(19) United States
(12) Patent Application Publication
(10) Pub. No.: US 2019/0256580 A1
(43) Pub. Date: Aug. 22, 2019

(54) ANTI-RESPIRATORY SYNCYTIAL VIRUS ANTIBODIES, AND METHODS OF THEIR GENERATION AND USE

(71) Applicant: Adimab, LLC, Lebanon, NH (US)

(72) Inventor: Laura M. Walker, Lebanon, NH (US)

(21) Appl. No.: 16/343,273

(22) PCT Filed: Oct. 20, 2017
(86) PCT No.: PCT/US17/57708

§ 371 Date: Apr. 18, 2019

Related U.S. Application Data
(60) Provisional application No. 62/411,510, filed on Oct. 21, 2016.

(51) Int. Cl. C07K 16/10; A61K 39/42; A61P 31/16

(52) U.S. Cl. CPC C07K 16/1027; A61P 31/16; A61K 39/42

(57) ABSTRACT

Anti-RSV antibodies with neutralizing potency against RSV subtype A and RSV subtype B are provided, as well as nucleic acid sequences encoding such antibodies, methods for their identification, isolation, generation, and methods for their preparation and use are provided.

### CROSS REFERENCE TO RELATED APPLICATIONS

[0001] The present application claims the benefit of U.S. Provisional Patent Application No. 62/411,510, filed Oct. 21, 2016, the entire contents of which are incorporated herein by reference.

### SEQUENCE LISTING

[0002] The instant application contains a Sequence Listing which has been submitted electronically in ASCII format and is hereby incorporated by reference in its entirety. Said ASCII copy, created on Mar. 31, 2016, is named “2009186_0166_SL.TXT” and is 851,610 bytes in size.

### FIELD OF THE INVENTION

[0003] The invention relates, inter alia, to anti-Respiratory Syncytial Virus (RSV) antibodies and functional fragments thereof, nucleic acid sequences encoding such antibodies and methods and reagents for their preparation and use.

### BACKGROUND OF THE INVENTION

[0004] All references cited herein, including without limitation patents, patent applications, and non-patent references and publications referenced throughout are hereby expressly incorporated by reference in their entireties for all purposes.

[0005] Respiratory syncytial virus (RSV) causes substantial morbidity and mortality in young children and the elderly, is the leading cause of infant hospitalization in the United States and accounts for an estimated 64 million infections and 160,000 deaths world-wide each year. However, despite decades of research, the development of a safe and effective vaccines or therapeutic and/or prophylactic antibodies against RSV has remained elusive, highlighting the need for novel strategies that induce or provide protective immune responses. (1-3). Indeed, to date there are currently no approved RSV vaccines, and passive prophylaxis with the monoclonal antibody palivizumab (marketed as Synagis®) is restricted to high-risk infants in part due to its modest efficacy.

[0006] Certain populations of children are at risk for developing an RSV infection and these include preterm infants (Hall et al., 1979, New Engl. J. Med. 300:393-396), children with congenital malformations of the airway, children with bronchopulmonary dysplasia (Groothuis et al., 1988, Pediatrics 82:199-203), children with congenital heart disease (MacDonald et al., New Engl. J. Med. 307:397-400), and children with congenital or acquired immunodeficiency (Ogra et al., 1988, Pediatr. Infect. Dis. J. 7:246-249; and Pohl et al., 1992, J. Infect. Dis. 165:166-169), and cystic fibrosis (Abman et al., 1988, J. Pediatr. 1 13:826-830).

[0007] RSV can infect the adult population as well. In this population, RSV causes primarily an upper respiratory tract disease, although elderly patients may be at greater risk for a serious infection and pneumonia (Evans, A. S., eds., 1989, Viral Infections of Humans. Epidemiology and Control, 3^{rd} ed., Plenum Medical Book, New York at pages 525-544), as well as adults who are immunosuppressed, particularly bone marrow transplant patients (Hertz et al., 1989, Medicine 68:269-281). Other at risk patients include those suffering from congestive heart failure and those suffering from chronic obstructive pulmonary disease (i.e. COPD). There have also been reports of epidemics among nursing home patients and institutionalized young adults (Falsey, A. R., 1991, Infect. Control Hosp. Epidemiol. 12:602-608; and Garvie et al., 1980, Br. Med. J. 281:1253-1254).

[0008] While treatment options for established RSV disease are limited, more severe forms of the disease of the lower respiratory tract often require considerable supportive care, including administration of humidified oxygen and respiratory assistance (Fields et al., eds, 1990, Fields Virology, 2^{nd} ed., Vol. 1, Raven Press, New York at pages 1045-1072).

[0009] Similar to other pneumoviruses, RSV expresses two major surface glycoproteins: the fusion protein (F) and the attachment protein (G). Although both have been shown to induce protective neutralizing antibody responses, F is less genetically variable than G, is absolutely required for infection, and is the target for the majority of neutralizing activity in human serum (4-8). RSV F is also the target of the monoclonal antibody palivizumab, which is used to passively protect high-risk infants from severe disease (9). Consequently, the RSV F protein is considered to be a highly attractive target for vaccines and antibody-based therapies.

[0010] The mature RSV F glycoprotein initially exists in a metastable prefusion conformation (preF) (10), before undergoing a conformational change that leads to insertion of the hydrophobic fusion peptide into the host-cell membrane. Subsequent refolding of F into a stable, elongated postfusion conformation (postF) (11, 12) results in fusion of the viral and host-cell membranes. Due to its inherent instability, the preF protein has the propensity to prematurely trigger into postF, both in solution and on the viral surface (13). Recently, stabilization of preF has been achieved by protein engineering (14, 15), and stabilized preF has been shown to induce higher titers of neutralizing antibodies than postF in animal models (15).

[0011] Despite the importance of neutralizing antibodies in protection against severe RSV disease, our understanding of the human antibody response to RSV has been limited to studies of human sera and a small number of RSV-specific human monoclonal antibodies (16-19). The epitopes recognized by these human antibodies, as well as several murine antibodies, have defined at least four ‘antigenic sites’ on RSV F (1, 10, 16, 18-20) (see also, e.g., Table 1). Three of these sites—I, II, and IV—are present on both pre- and postF, whereas antigenic site ø exists exclusively on preF. Additional preF-specific epitopes have been defined by antibodies MPE8 (17) and AM14 (21). Although serum mapping studies have shown that site ø-directed antibodies are responsible for a large proportion of the neutralizing antibody response in most individuals (8), there are additional antibody specificities that contribute to serum neutralizing activity that remain to be defined. In addition, it was heretofore unknown whether certain antibody sequence features are required for recognition of certain neutralizing sites, as observed for other viral targets (22-25). Accordingly, understanding the relationship between neutralization potency and epitope specificity would be advantageous in the selection and/or design of vaccine antigens, as well as therapeutic and/or prophylactic antibodies, which induce potent neutralizing responses to RSV.

[0012] While treatment options for established RSV disease are limited, more severe forms of the disease of the lower respiratory tract often require considerable supportive care, including administration of humidified oxygen and respiratory assistance (Fields et al., eds, 1990, Fields Virology, 2^{nd} ed., Vol. 1, Raven Press, New York at pages 1045-1072).

[0013] Ribavirin, which is the only drug approved for treatment of infection, has been shown to be effective in the treatment of pneumonia and bronchiolitis associated with RSV infection, and has been shown to modify the course of severe RSV disease in immunocompetent children (Smith et al., 1991, New Engl. J. Med. 325:24-29). The use of ribavirin is limited due to concerns surrounding its potential risk to pregnant women who may be exposed to the aerosolized drug while it is being administered in a hospital environment.

[0014] Similarly, while a vaccine may be useful, no commercially available vaccine has been developed to date. Several vaccine candidates have been abandoned and others are under development (Murphy et al., 1994, Virus Res. 32: 13-36). The development of a vaccine has proven to be problematic. In particular, immunization would be required in the immediate neonatal period since the peak incidence of lower respiratory tract disease occurs at 2-5 months of age. However, it is known that the neonatal immune response is immature at that time. Plus, the infant at that point in time still has high titers of maternally acquired RSV antibody, which might reduce vaccine immunogenicity (Murphy et al., 1988, J. Virol. 62:3907-3910; and Murphy et al, 1991, Vaccine 9:185-189).

[0015] Currently, the only approved approach to prophylaxis of RSV disease is passive immunization. For example, the humanized antibody, palivizumab (SYNAGIS®), which is specific for an epitope on the F protein, is approved for intramuscular administration to pediatric patients for prevention of serious lower respiratory tract disease caused by RSV at recommended monthly doses of 15 mg/kg of body weight throughout the RSV season (November through April in the northern hemisphere). SYNAGIS® is a composite of human (95%) and murine (5%) antibody sequences. (Johnson et al, (1997), J. Infect. Diseases 176:1215-1224 and U.S. Pat. No. 5,824,307).

[0016] Although SYNAGIS® has been successfully used for the prevention of RSV infection in pediatric patients, multiple intramuscular doses of 15 mg/kg of SYNAGIS® are required to achieve a prophylactic effect. The necessity for the administration of multiple intramuscular doses of antibody requires repeated visits to the doctor's office, which is not only inconvenient for the patient but can also result in missed doses.

[0017] Efforts were made to improve on the therapeutic profile of an anti-RSV-F antibody, and this lead to the identification and development of motavizumab, also referred to as NUMAX™. However, clinical testing revealed that certain of the patients being administered motavizumab were having severe hypersensitivity reactions. Further development of this humanized anti-RSV-F antibody was then discontinued.

[0018] Other antibodies to RSV-F protein have been described and can be found in U.S. Pat. Nos. 6,656,467; 5,824,307, 7,786,273; 7,670,600; 7,083,784; 6,818,216; 7,700,735; 7,553,489; 7,323,172; 7,229,619; 7,425,618; 7,740,851; 7,658,921; 7,704,505; 7,635,568; 6,855,493; 6,565,849; 7,582,297; 7,208,162; 7,700,720; 6,413,771; 5,811,524; 6,537,809; 5,762,905; 7,070,786; 7,364,742; 7,879,329; 7,488,477; 7,867,497; 5,534,411; 6,835,372; 7,482,024; 7,691,603; 8,562,996; 8,568,726; 9,447,173; US20100015596; WO2009088159A1; and WO2014159822. To date, none other than SYNAGIS® has been approved by a regulatory agency for use in preventing an RSV infection.

[0019] There remains a need for the provision of highly specific, high affinity, and highly potent neutralizing anti-RSV antibodies and antigen-binding fragments thereof with neutralize at least one, but preferably both, of subtype A and subtype B RSV viral strains, and which preferentially recognize PreF relative to PostF conformations of the F protein. There also remains a need for the provision of anti-RSV and anti-HMPV cross-neutralizing antibodies and antigen-binding fragments thereof.

### SUMMARY OF THE INVENTION

[0020] Applicant has now discovered, isolated, and characterized, inter alia, an extensive panel of RSV F-specific monoclonal antibodies from the memory B cells of a healthy adult human donor and used these antibodies to comprehensively map the antigenic topology of RSV F. A large proportion of the RSV F-specific human antibody repertoire was advantageously comprised of antibodies with greatly enhanced specificity for the PreF conformation of the F protein (relative to the PostF form), many if not most of which exhibited remarkable potency in neutralization assays against one or both of RSV subtype A and RSV subtype B strains. Indeed, a large number of these antibodies display neutralization potencies that are multiple-fold greater—some 5- to 100-fold greater or more—to previous anti-RSV therapeutic antibodies, such as D25 and pavlizumamab thus serve as attractive therapeutic and/or prophylactic candidates for treating and/or preventing RSV infection and disease.

[0021] The most potent antibodies were found to target two distinct antigenic sites that are located near the apex of the preF trimer, providing strong support for the development of therapeutic and/or prophylactic antibodies targeting these antigenic sites, as well as preF-based vaccine candidates that preserve these antigenic sites. Furthermore, the neutralizing antibodies described and disclosed herein represent new opportunities for the prevention of severe RSV disease using passive immunoprophylaxis.

[0022] Given the role that the F protein plays in fusion of the virus with the cell and in cell to cell transmission of the virus, the antibodies described herein provide a method of inhibiting that process and as such, may be used for preventing infection of a patient exposed to, or at risk for acquiring an infection with RSV, or for treating and/or ameliorating one or more symptoms associated with RSV infection in a patient exposed to, or at risk for acquiring an infection with RSV, or suffering from infection with RSV. The antibodies and pharmaceutical compositions described herein may also be used to prevent or to treat an RSV infection in a patient who may experience a more severe form of the RSV infection due to an underlying or pre-existing medical condition. A patient who may benefit from treatment with an antibody and/or a pharmaceutical composition of the invention may be a pre-term infant, a full-term infant born during RSV season (approximately late fall (November) through early spring (April)) that is at risk because of other pre-existing or underlying medical conditions including congenital heart disease or chronic lung disease, a child greater than one year of age with or without an underlying medical condition, an institutionalized or hospitalized patient, or an elderly adult (>65 years of age) with or without an underlying medical condition, such as congestive heart failure (CHF), or chronic obstructive pulmonary disease (COPD). A patient who may benefit from such therapy may suffer from a medical condition resulting from a compromised pulmonary, cardiovascular, neuromuscular, or immune system. For example, the patient may suffer from an abnormality of the airway, or an airway malfunction, a chronic lung disease, a chronic or congenital heart disease, a neuromuscular disease that compromises the handling of respiratory secretions, or the patient may be immunosuppressed due to severe combined immunodeficiency disease or severe acquired immunodeficiency disease, or from any other underlying infectious disease or cancerous condition that results in immunosuppression, or the patient may be immunosuppressed due to treatment with an immunosuppressive drug (e.g., any drug used for treating a transplant patient) or radiation therapy. A patient who may benefit from the antibodies and/or pharmaceutical compositions of the invention may be a patient that suffers from chronic obstructive pulmonary disease (COPD), cystic fibrosis (CF), bronchopulmonary dysplasia, congestive heart failure (CHF), or congenital heart disease.

[0023] Because the inventive antibodies and antigen-binding fragments thereof are more effective at neutralization of RSV compared to known antibodies, lower doses of the antibodies or antibody fragments or pharmaceutical compositions of the invention could be used to achieve a greater level of protection against infection with RSV, and more effective treatment and/or amelioration of symptoms associated with an RSV infection. Accordingly, the use of lower doses of antibodies, or fragments thereof, which immunospecifically bind to RSV-F antigen and/or pharmaceutical compositions may result in fewer or less severe adverse events. Likewise, the use of more effective neutralizing antibodies may result in a diminished need for frequent administration of the antibodies or antibody fragments or pharmaceutical compositions than previously envisioned as necessary for the prevention of infection, or for virus neutralization, or for treatment or amelioration of one or more symptoms associated with an RSV infection. Symptoms of RSV infection may include a bluish skin color due to lack of oxygen (hypoxia), breathing difficulty (rapid breathing or shortness of breath), cough, croupy cough (“seal bark” cough), fever, nasal flaring, nasal congestion (stuffy nose), apnea, decreased appetite, dehydration, poor feeding, altered mental status, or wheezing.

[0024] Such antibodies or pharmaceutical compositions may be useful when administered prophylactically (prior to exposure to the virus and infection with the virus) to lessen the severity, or duration of a primary infection with RSV, or ameliorate at least one symptom associated with the infection. The antibodies or pharmaceutical compositions may be used alone or in conjunction with a second agent useful for treating an RSV infection. In certain embodiments, the antibodies or pharmaceutical compositions may be given therapeutically (after exposure to and infection with the virus) either alone, or in conjunction with a second agent to lessen the severity or duration of the primary infection, or to ameliorate at least one symptom associated with the infection. In certain embodiments, the antibodies or pharmaceutical compositions may be used prophylactically as stand-alone therapy to protect patients who are at risk for acquiring an infection with RSV, such as those described above. Any of these patient populations may benefit from treatment with the antibodies or pharmaceutical compositions of the invention, when given alone or in conjunction with a second agent, including for example, an anti-viral therapy, such as ribavirin, or other anti-viral vaccines.

[0025] The antibodies of the invention can be full-length (for example, an IgG1 or IgG4 antibody) or may comprise only an antigen-binding portion (for example, a Fab, F(ab′)₂ or scFv fragment), and may be modified to affect functionality, e.g., to eliminate residual effector functions (Reddy et al., (2000), J. Immunol. 164:1925-1933).

[0026] Accordingly, in certain embodiments are provided isolated antibodies or antigen-binding fragments thereof that specifically bind to Respiratory Syncytial Virus (RSV) F protein (F), wherein at least one, at least two, at least three, at least four, at least five, or at least six of the CDRH1, a CDRH2, a CDRH3, a CDRL1, a CDRL2, and CDRL3 amino acid sequence such antibodies or the antigen-binding fragments thereof are at least 70% identical; at least 75% identical; 80% identical; at least 85% identical; at least 90% identical; at least 95% identical; at least 96% identical; at least 97% identical; at least 98% identical; at least 99%; at least 100% and/or all percentages of identity in between; to at least one, at least two, at least three, at least four, at least five, or at least six of the CDRH1, a CDRH2, a CDRH3, a CDRL1, a CDRL2, and/or a CDRL3 amino acid sequences as disclosed in Table 6 of an antibody selected from Antibody Number 1 through Antibody Number 123 as disclosed in Table 6; and wherein said antibody or the antigen-binding fragment thereof also has one or more of the following characteristics: a) the antibodies or antigen-binding fragments thereof cross-compete with said antibodies or antigen-binding fragments thereof for binding to RSV-F; b) the antibodies or antigen-binding fragments thereof display better binding affinity for the PreF form of RSV-F relative to the PostF form; c) the antibodies or antigen-binding fragments thereof display a clean or low polyreactivity profile; d) the antibodies or antigen-binding fragments thereof display neutralization activity toward RSV subtype A and RSV subtype B in vitro; e) the antibodies or antigen-binding fragments thereof display antigenic site specificity for RSV-F at Site ø, Site I, Site II, Site III, Site IV, or Site V; f) the antibodies or antigen-binding fragments thereof display antigenic site specificity for RSV-F Site ø, Site V, or Site III relative to RSV-F Site I, Site II, or Site IV; g) at least a portion of the epitope with which the antibodies or antigen-binding fragments thereof interact comprises the α3 helix and β3/β4 hairpin of PreF; h) the antibodies or antigen-binding fragments thereof display an in vitro neutralization potency (IC₅₀) of between about 0.5 microgram/milliliter (μg/ml) to about 5 μg/ml; between about 0.05 μg/ml to about 0.5 μg/ml; or less than about 0.05 mg/ml; i) the binding affinities and/or epitopic specificities of the antibodies or antigen-binding fragments thereof for any one of the RSV-F variants designated as 1, 2, 3, 4, 5, 6, 7, 8, 9, and DG in FIG. 7A is reduced or eliminated relative to the binding affinities and/or epitopic specificities of said antibodies or antigen-binding fragments thereof for the RSV-F or RSV-F DS-Cav1; j) the antibodies or antigen-binding fragments thereof display a cross-neutralization potency (IC₅₀) against human metapneumovirus (HMPV); k) the antibodies or antigen-binding fragments thereof do not complete with D25, MPE8, palivizumab, or motavizumab; or 1) the antibodies or antigen-binding fragments thereof display at least about 2-fold; at least about 3-fold; at least about 4-fold; at least about 5-fold; at least about 6-fold; at least about 7-fold; at least about 8-fold; at least about 9-fold; at least about 10-fold; at least about 15-fold; at least about 20-fold; at least about 25-fold; at least about 30-fold; at least about 35-fold; at least about 40-fold; at least about 50-fold; at least about 55-fold; at least about 60-fold; at least about 70-fold; at least about 80-fold; at least about 90-fold; at least about 100-fold; greater than about 100-fold; and folds in between any of the foregoing; greater neutralization potency (IC₅₀) than D25 and/or palivizumab.

[0027] In certain other embodiments, the isolated antibodies or antigen-binding fragments thereof comprise: at least two; at least three; at least 4; at least 5; at least 6; at least 7; at least 8; at least 9; at least 10; at least 11; or at least 12; of characteristics a) through 1) above.

[0028] In certain other embodiments, the isolated antibodies or antigen-binding fragments thereof comprise: a) the CDRH3 amino acid sequence of any one of the antibodies designated Antibody Number 1 through Antibody Number 123 as disclosed in Table 6; b) the CDRH2 amino acid sequence of any one of the antibodies designated Antibody Number 1 through Antibody Number 123 as disclosed in Table 6; c) the CDRH1 amino acid sequence of any one of the antibodies designated Antibody Number 1 through Antibody Number 123 as disclosed in Table 6; d) the CDRL3 amino acid sequence of any one of the antibodies designated Antibody Number 1 through Antibody Number 123 as disclosed in Table 6; e) the CDRL2 amino acid sequence of any one of the antibodies designated Antibody Number 1 through Antibody Number 123 as disclosed in Table 6; f) the CDRL1 amino acid sequence of any one of the antibodies designated Antibody Number 1 through Antibody Number 123 as disclosed in Table 6; or g) any combination of two or more of a), b), c), d), e), and f).

[0029] In certain other embodiments, the isolated antibodies or antigen-binding fragments thereof comprise: a) a heavy chain (HC) amino acid sequence of any one of the antibodies designated Antibody Number 1 through Antibody Number 123 as disclosed in Table 6; and/or b) a light chain (LC) amino acid sequence of any one of the antibodies designated Antibody Number 1 through Antibody Number 123 as disclosed in Table 6.

[0030] In certain other embodiments, the isolated antibodies or antigen-binding fragments thereof are selected from the group consisting of antibodies that are at least 70% identical; at least 75% identical; 80% identical; at least 85% identical; at least 90% identical; at least 95% identical; at least 96% identical; at least 97% identical; at least 98% identical; at least 99%; and/or all percentages of identity in between; to any one of the antibodies designated as Antibody Number 1 through Antibody Number 123 as disclosed in Table 6.

[0031] In certain other embodiments, the isolated antibodies or antigen-binding fragments thereof are selected from the group consisting of the antibodies designated as Antibody Number 1 through Antibody Number 123 as disclosed in Table 6.

[0032] In other embodiments are provided isolated nucleic acid sequences encoding antibodies, light and/or heavy chains thereof, antigen-binding fragments thereof, or light and/or heavy chains encoding such antigen-binding fragments according to any of the other embodiments disclosed herein.

[0033] In other embodiments are provided expression vectors comprising isolated nucleic acid sequences according to other embodiments disclosed herein.

[0034] In other embodiments are provided host cells transfected, transformed, or transduced with nucleic acid sequences or expression vectors according to other embodiments disclosed herein.

[0035] In other embodiments are provided pharmaceutical compositions comprising one or more of the isolated antibodies or antigen-binding fragments thereof according to other embodiments disclosed herein; and a pharmaceutically acceptable carrier and/or excipient.

[0036] In other embodiments are provided pharmaceutical compositions comprising a nucleic acid sequence of the invention, e.g., one or more nucleic acid sequences encoding at least one of a light or heavy chain of an antibody or both according other embodiments disclosed herein; or one or more the expression vectors according to other embodiments disclosed herein; and a pharmaceutically acceptable carrier and/or excipient.

[0037] In other embodiments are provided transgenic organisms comprising nucleic acid sequences according to other embodiments disclosed herein; or expression vectors according to other embodiments disclosed herein.

[0038] In other embodiments are provided methods of treating or preventing a Respiratory Syncytial Virus (RSV) infection, or at least one symptom associated with RSV infection, comprising administering to a patient in need there of or suspected of being in need thereof: a) one or more antibodies or antigen-binding fragments thereof according to other embodiments disclosed herein; b) nucleic acid sequences according to other embodiments disclosed herein; an expression vector according to other embodiments disclosed herein; a host cell according to other embodiments disclosed herein; or e) a pharmaceutical composition according to other embodiments disclosed herein; such that the RSV infection is treated or prevented, or the at least on symptom associated with RSV infection is treated, alleviated, or reduced in severity.

[0039] In other embodiments are provided methods of treating or preventing either a Respiratory Syncytial Virus (RSV) infection and/or a human metapneumovirus (HMPV) infection, or at least one symptom associated with said RSV infection or said HMPV infection, comprising administering to a patient in need thereof or suspected of being in need thereof: a) one or more antibodies or antigen-binding fragments thereof according to other embodiments disclosed herein; b) a nucleic acid sequences according to other embodiments disclosed herein; c) an expression vector according to other embodiments disclosed herein; d) a host cell according to other embodiments disclosed herein; or e) a pharmaceutical composition according to other embodiments disclosed herein; such that the RSV infection is treated or prevented, or the at least on symptom associated with RSV infection is treated, alleviated, or reduced in severity. In other embodiments are provided methods according to other embodiments wherein the one or more antibodies or antigen-binding fragments thereof of a) is selected from the group consisting of the antibodies designated as Antibody Number 4, 11, and 62 as disclosed in Table 6.

[0040] In other embodiments are provided methods according to other embodiments wherein the method further comprises administering to the patient a second therapeutic agent.

[0041] In other embodiments are provided methods according to other embodiments, wherein the second therapeutic agent is selected group consisting of an antiviral agent; a vaccine specific for RSV, a vaccine specific for influenza virus, or a vaccine specific for metapneumovirus (MPV); an siRNA specific for an RSV antigen or a metapneumovirus (MPV) antigen; a second antibody specific for an RSV antigen or a metapneumovirus (MPV) antigen; an anti-IL4R antibody, an antibody specific for an influenza virus antigen, an anti-RSV-G antibody and a NSAID.

[0042] In certain embodiments are provided pharmaceutical compositions comprising any one or more of the isolated antibodies or antigen-binding fragments thereof, or one or more nucleic acid sequences encoding at least one of a light chain or heavy chain of an antibody according to other embodiments disclosed herein or an antigen binding fragment thereof, and a pharmaceutically acceptable carrier and/or excipient.

[0043] In certain embodiments are provided pharmaceutical compositions according to other embodiments for use in preventing a respiratory syncytial virus (RSV) infection in a patient in need thereof or suspected of being in need thereof, or for treating a patient suffering from an RSV infection, or for ameliorating at least one symptom or complication associated with the infection, wherein the infection is either prevented, or at least one symptom or complication associated with the infection is prevented, ameliorated, or lessened in severity and/or duration as a result of such use.

[0044] In certain embodiments are provided pharmaceutical compositions according to other embodiments for use in treating or preventing either a Respiratory Syncytial Virus (RSV) infection and/or a human metapneumovirus (HMPV) infection, or at least one symptom associated with said RSV infection and/or said HMPV infection, in a patient in need thereof or suspected of being in need thereof, wherein the infection is either prevented, or at least one symptom or complication associated with the infection is prevented, ameliorated, or lessened in severity and/or duration as a result of such use.

[0045] In certain other embodiments are provided uses of the pharmaceutical compositions according to other embodiments in the manufacture of a medicament for preventing a respiratory syncytial virus (RSV) infection in a patient in need thereof, or for treating a patient suffering from an RSV infection, or for ameliorating at least one symptom or complication associated with the infection, wherein the infection is either prevented, or at least one symptom or complication associated with the infection is prevented, ameliorated, or lessened in severity and/or duration.

[0046] In certain other embodiments are provided uses of the pharmaceutical compositions according to other embodiments in the manufacture of a medicament for preventing either a Respiratory Syncytial Virus (RSV) infection and/or a human metapneumovirus (HMPV) infection, or at least one symptom associated with said RSV infection and/or said HMPV infection, in a patient in need thereof or suspected of being in need thereof, wherein the infection is either prevented, or at least one symptom or complication associated with the infection is prevented, ameliorated, or lessened in severity and/or duration as a result of such use.

### BRIEF DESCRIPTION OF THE FIGURES

[0047] FIGS. 1A-1F illustrate the anti-RSV repertoire cloning and sequence analysis of the identified and isolated antibodies. FIG. 1A: RSV F-specific B cell sorting. FACS plots show RSV F reactivity of IgG⁺ and IgA⁺ B cells from the healthy adult donor. B cells in quadrant 2 (Q2) were single cell sorted. FIG. 1B: Isotype analysis. Index sort plots show the percentage of RSV F-specific B cells that express IgG or IgA. FIG. 1C: Clonal lineage analysis. Each slice represents one clonal lineage; the size of the slice is proportional to the number of clones in the lineage. The total number of clones is shown in the center of the pie. Clonal lineages were assigned based on the following criteria: 1) matching of variable and joining gene segments; 2) identical CDR3 loop lengths; and 3) >80% homology in CDR3 nucleotide sequences. FIG. 1D: VH repertoire analysis. VH germline genes were considered to be enriched in the RSV repertoire if a given gene was found to be enriched by greater than 3-fold over non-RSV-specific repertoires (33). FIG. 1E: CDRH3 length distribution. FIG. 1F: Somatic hypermutation in VH (excluding CDRH3). Red bar indicates the average number of nucleotide substitutions. Each clonal lineage is only represented once in FIG. 1D and FIG. 1E. Data for non-RSV reactive IgGs were derived from published sequences obtained by high-throughput sequencing of re-arranged antibody variable gene repertoires from healthy individuals (33).

[0048] FIGS. 2A-2D illustrate the similar antibody preferences observed for conformational state and subtype of RSV F in the repertoire. FIG. 2A: IgG affinities for preF and postF are plotted as shown. FIG. 2B: Percentage of antibodies within the donor repertoire that recognized both conformations of F (green) or bind only to preF (blue) or postF (orange). FIG. 2C: Percentage of antibodies within the donor repertoire that bind specifically to subtype A (green), subtype B (blue), or both subtypes A and B (red). N.B., non-binder. IgG KDs were calculated for antibodies with BLI responses >0.1 nm. Antibodies with BLI responses <0.05 nm were designated as N.B. FIG. 2D: Polyreactivity analysis of anti-RSV antibodies. The polyreactivity of the isolated anti-RSV F antibodies was measured using a previously described assay (42, 43). Three panels of control antibodies were included for comparison: a group of 138 antibodies currently in clinical trials, 39 antibodies that have been approved for clinical use and 14 broadly neutralizing HIV antibodies.

[0049] FIGS. 3A-3G illustrate mapping and specificities of anti-RSV antibodies for antigenic sites spanning the surface of PreF and PostF. FIG. 3A: The previously determined structure of preF with one protomer shown as ribbons and with six antigenic sites rainbow colored from red to purple. FIG. 3B: The percentage of antibodies targeting each antigenic site is shown. FIG. 3C: Percentage of preF-specific antibodies targeting each antigenic site. FIG. 3D: Apparent antibody binding affinities for subtype A PreF antigenic sites. FIG. 3E: Apparent binding affinities for subtype A postF antigenic sites. FIG. 3F: Apparent antibody binding affinities for subtype B PreF antigenic sites. FIG. 3G. Apparent binding affinities for subtype B postF. Only antibodies with apparent binding affinities greater than 2 nM were included in this analysis, since antibodies with lower affinity could not be reliably mapped. Red bars show the median and the dotted grey line is at 2 nM. N.B., non-binder.

[0050] FIGS. 4A-4G illustrate neutralizing potencies of anti-RSV antibodies and correlation between potency and Pref vs. PostF specificity for each of RSV subtypes A and B. FIG. 4A: Neutralization IC₅₀s for the antibodies isolated from the donor repertoire. Data points are colored based on neutralization potency, according to the legend on the right. Red and blue dotted lines depict motavizumab and D25 IC₅₀s, respectively. FIG. 4B: Percentage of neutralizing antibodies in the donor repertoire against RSV subtype A or subtype B, stratified by potency as indicated in the legend in the right portion of the figure. FIG. 4C: Percentage of antibodies within the donor repertoire that neutralized both RSV subtypes A and B (red) or neutralized only RSV subtype A (green) or subtype B (blue). FIG. 4D: Apparent binding affinities for subtype A, preF and postF, plotted for each antibody (IgG K_{D}s were calculated for antibodies with BLI responses >0.1 nm. Antibodies with BLI responses <0.05 nm were designated as N.B.) FIG. 4E: Neutralization IC₅₀s plotted for RSV subtype A preF-specific, postF-specific, and cross-reactive antibodies. (Red and blue dotted lines depict motavizumab and D25 IC₅₀s, respectively. Red bars depict median. N.B., non-binder; N.N., non-neutralizing). FIG. 4F: Apparent antibody binding affinities for subtype B, preF and postF. FIG. 4G: IC₅₀s plotted for RSV subtype B preF-specific, postF-specific and cross-reactive antibodies. (Black bar depicts median. N.B., non-binder; N.N., non-neutralizing.)

[0051] FIGS. 5A-5C illustrate that the most potent neutralizing antibodies bind with high affinity to preF and recognize antigenic sites ø and V. FIG. 5A: apparent preF K_{D} plotted against neutralization IC₅₀ and colored according to antigenic site, as shown in the legend at right of FIG. 5C. FIG. 5B: apparent postF K_{D} plotted against neutralization IC₅₀ and colored as in FIG. 5A. FIG. 5C: antibodies grouped according to neutralization potency and colored by antigenic site as in legend at right. N.B., non-binder; N.N., non-neutralizing. IgG K_{D}s were calculated for antibodies with BLI responses >0.1 nm. Antibodies with BLI responses <0.05 nm were designated as N.B. Statistical significance was determined using an unpaired two-tailed t test. The Pearson's correlation coefficient, r, was calculated using Prism software version 7.0. Antibodies that failed to bind or neutralize were excluded from the statistical analysis due to the inability to accurately calculate midpoint concentrations.

[0052] FIGS. 6A-6C illustrate the nature and purification of pre- and postF sorting probes. FIG. 6A: Schematic of fluorescent prefusion RSV F probe shows one PE-conjugated streptavidin molecule bound by four avi-tagged trimeric prefusion F molecules. FIG. 6B: Coomassie-stained SDS-PAGE gel demonstrating the isolation of RSV F with a single AviTag per trimer using sequential Ni-NTA and Strep-Tactin purifications, as described in the Methods. FIG. 6C: Fluorescence size-exclusion chromatography (FSEC) trace of the tetrameric probes on a Superose 6 column. Positions of molecular weight standards are indicated with arrows.

[0053] FIGS. 7A-7C illustrate the generation and validation of preF patch panel mutants. FIG. 7A: Panel of RSV F variants used for epitope mapping. FIG. 7B: Prefusion RSV F shown as molecular surface with one protomer colored in white. The nine variants, each containing a patch of mutations, are uniquely colored according to the table in FIG. 7A. FIG. 7C: Binding of each IgG to fluorescently labeled beads coupled to each of the variants listed in FIG. 7A was measured using PE-conjugated anti-human Fc antibody on a FLEXMAP 3D flow cytometer (Luminex). Reduced binding of D25 and motavizumab to patches 1 and 5, respectively, is consistent with their structurally defined epitopes (10, 11). AM14 binding was reduced for both patch 3 and patch 9, due to its unique protomer-spanning epitope (21). This characteristic binding profile was used to assist in the classification of other possible quaternary-specific antibodies in the panel.

[0054] FIG. 8 illustrates the antigenic site V resides between the epitopes recognized by D25, MPE8 and motavizumab. Prefusion F is shown with one promoter as a cartoon colored according to antigenic site location and the other two protomers colored grey. D25 and motavizumab Fabs are shown in blue and pink, respectively. The MPE8 binding site is circled in black. Antigenic site V is located between the binding sites of D25 and MPE8 within one protomer, explaining the competition between site-V directed antibodies and these controls. Competition with motavizumab may occur across two adjacent protomers (left) or within one protomer (right), depending on the angle-of-approach of these site-V directed antibodies.

[0055] FIG. 9 illustrates percentage of anti-RSV antibodies demonstrating the indicated neutralizing activities of preF-specific, postF-specific, and cross-reactive antibodies. Antibodies were stratified according to neutralization potency and the percentage of antibodies in each group that were preF-specific (pink), postF-specific (white) or cross-reactive (orange) were plotted for subtype A (left panel) and subtype B (right panel).

[0056] FIGS. 10A-10C illustrate the relationship between subtype B neutralization and antigenic site specificity for anti-RSV antibodies. FIG. 10A: Subtype B preF affinity plotted against neutralization IC₅₀ for all antibodies and colored by antigenic site according to the color scheme depicted in FIG. 10C, right portion. FIG. 10B: PostF affinity plotted against IC₅₀ and colored as in FIG. 10A. FIG. 10C: Antibodies with preF affinities higher than 2 nM grouped according to neutralization potency and colored by antigenic site (right portion).

### DETAILED DESCRIPTION OF THE INVENTION

[0057] Unless defined otherwise, all technical and scientific terms used herein have the same meaning as commonly understood by one of ordinary skill in the art to which this invention belongs. As used herein, the term “about,” when used in reference to a particular recited numerical value, means that the value may vary from the recited value by no more than 1%. For example, as used herein, the expression “about 100” includes 99 and 101 and all values in between (e.g., 99.1, 99.2, 99.3, 99.4, etc.).

### Definitions

[0058] “Respiratory Syncytial Virus-F protein”, also referred to as “RSV-F” or “RSV F” is a type I transmembrane surface protein, which has an N terminal cleaved signal peptide and a membrane anchor near the C terminus (Collins, P. L. et al., (1984), PNAS (USA) 81:7683-7687). The RSV-F protein is synthesized as an inactive 67 KDa precursor denoted as F0 (Calder, L. J.; et al., Virology (2000), 277, 122-131. The F0 protein is activated proteolytically in the Golgi complex by a furin-like protease at two sites, yielding two disulfide linked polypeptides, F2 and F1, from the N and C terminal, respectively. There is a 27 amino acid peptide released called “pep27”. There are furin cleavage sites (FCS) on either side of the pep27 (Collins, P. L.; Mottet, G. (1991), J. Gen. Virol., 72: 3095-3101; Sugrue, R. J, et al. (2001), J. Gen. Virol., 82, 1375-1386). The F2 subunit consists of the Heptad repeat C (HRC), while the F1 contains the fusion polypeptide (FP), heptad repeat A (HRA), domain I, domain II, heptad repeat B (HRB), transmembrane (TM) and cytoplasmic domain (CP) (See Sun, Z. et al. Viruses (2013), 5:21 1-225). The RSV-F protein plays a role in fusion of the virus particle to the cell membrane, and is expressed on the surface of infected cells, thus playing a role in cell to cell transmission of the virus and syncytia formation. The amino acid sequence of the RSV-F protein is provided in GenBank as accession number AAX23994.

[0059] A stabilized variant of the PreF trimeric conformation of RSV-F, termed “RSV-DS-Cav1”, or “DS-Cav1” disclosed in, inter alia, Stewart-Jones et al., PLos One, Vol. 10(6)):e0128779 and WO 2011/050168, was used in the identification, isolation, and characterization of the antibodies disclosed herein.

[0060] The term “laboratory strain” as used herein refers to a strain of RSV (subtype A or B) that has been passaged extensively in in vitro cell culture. A “laboratory strain” can acquire adaptive mutations that may affect their biological properties. A “clinical strain” as used herein refers to an RSV isolate (subtype A or B), which is obtained from an infected individual and which has been isolated and grown in tissue culture at low passage.

[0061] The term “effective dose 99” or “ED₉₉” refers to the dosage of an agent that produces a desired effect of 99% reduction of viral forming plaques relative to the isotype (negative) control. In the present invention, the ED₉₉ refers to the dosage of the anti-RSV-F antibodies that will neutralize the virus infection (e.g., reduce 99% of viral load) in vivo, as described in Example 5.

[0062] The term “IC₅₀” refers to the “half maximal inhibitory concentration”, which value measures the effectiveness of compound (e.g., anti-RSV-F antibody) inhibition towards a biological or biochemical utility. This quantitative measure indicates the quantity required for a particular inhibitor to inhibit a given biological process by half. In certain embodiments, RSV virus neutralization potencies for anti-RSV and/or anti-RSV/anti-HMPV cross-neutralizing antibodies disclosed herein are expressed as neutralization IC₅₀ values.

[0063] “Palivizumab”, also referred to as “SYNAGIS®”, is a humanized anti-RSV-F antibody with heavy and light chain variable domains having the amino acid sequences as set forth in U.S. Pat. Nos. 7,635,568 and 5,824,307. This antibody, which immunospecifically binds to the RSV-F protein, is currently FDA-approved for the passive immunoprophylaxis of serious RSV disease in high-risk children and is administered intramuscularly at recommended monthly doses of 15 mg/kg of body weight throughout the RSV season (November through April in the northern hemisphere). SYNAGIS® is composed of 95% human and 5% murine antibody sequences. See also Johnson et al., (1997), J. Infect. Diseases 176:1215-1224.

[0064] “Motavizumab”, also referred to as “NUMAX™”, is an enhanced potency RSV-F-specific humanized monoclonal antibody derived by in vitro affinity maturation of the complementarity-determining regions of the heavy and light chains of palivizumab. For reference purposes, the amino acid sequence of the NUMAX™ antibody is disclosed in U.S. Patent Publication 2003/0091584 and in U.S. Pat. No. 6,818,216 and in Wu et al., (2005) J. Mol. Bio. 350(1):126-144 and in Wu et al. (2007) J. Mol. Biol. 368:652-665. It is also shown herein as SEQ ID NO: 359 for the heavy chain and as SEQ ID NO: 360 for the light chain of the antibody.

[0065] As used herein, the terms “treat,” “treatment” and “treating” refer to the reduction or amelioration of the progression, severity, and/or duration of an upper and/or lower respiratory tract RSV infection and/or human metapneumovirus (HMPV), otitis media, or a symptom or respiratory condition related thereto (such as asthma, wheezing, or a combination thereof) resulting from the administration of one or more therapies (including, but not limited to, the administration of one or more prophylactic or therapeutic agents). In certain embodiments, such terms refer to the reduction or inhibition of the replication of RSV and/or HMPV, the inhibition or reduction in the spread of RSV and/or HMPV to other tissues or subjects (e.g., the spread to the lower respiratory tract), the inhibition or reduction of infection of a cell with a RSV and/or HMPV, or the amelioration of one or more symptoms associated with an upper and/or lower respiratory tract RSV infection or otitis media.

[0066] As used herein, the terms “prevent,” “preventing,” and “prevention” refer to the prevention or inhibition of the development or onset of an upper and/or lower respiratory tract RSV and/or HMPV infection, otitis media or a respiratory condition related thereto in a subject, the prevention or inhibition of the progression of an upper respiratory tract RSV and/or HMPV infection to a lower respiratory tract RSV and/or HMPV infection, otitis media or a respiratory condition related thereto resulting from the administration of a therapy (e.g., a prophylactic or therapeutic agent), the prevention of a symptom of an upper and/or lower tract RSV and/or HMPV infection, otitis media or a respiratory condition related thereto, or the administration of a combination of therapies (e.g., a combination of prophylactic or therapeutic agents). As used herein, the terms “ameliorate” and “alleviate” refer to a reduction or diminishment in the severity a condition or any symptoms thereof.

[0067] The term “antibody”, as used herein, is intended to refer to immunoglobulin molecules comprised of four polypeptide chains, two heavy (H) chains and two light (L) chains interconnected by disulfide bonds (i.e., “full antibody molecules”), as well as multimers thereof (e.g. IgM) or antigen-binding fragments thereof. Each heavy chain (HC) is comprised of a heavy chain variable region (“HCVR” or “V_{H}”) and a heavy chain constant region (comprised of domains C_{H}1, C_{H}2 and C_{H}3). Each light chain (LC) is comprised of a light chain variable region (“LCVR or “V_{L}”) and a light chain constant region (C_{L}). The V_{H} and V_{L} regions can be further subdivided into regions of hypervariability, termed complementarity determining regions (CDRs), interspersed with regions that are more conserved, termed framework regions (FRs). Each V_{H} and V_{L} is composed of three CDRs and four FRs, arranged from amino-terminus to carboxy-terminus in the following order: FR1, CDR1, FR2, CDR2, FR3, CDR3, FR4. In certain embodiments of the invention, the FRs of the antibody (or antigen-binding fragment thereof) may be identical to the human germline sequences, or may be naturally or artificially modified. An amino acid consensus sequence may be defined based on a side-by-side analysis of two or more CDRs. Accordingly, the CDRs in a heavy chain are designated “CHRH1”, “CDRH2”, and “CDRH3”, respectively, and the CDRs in a light chain are designated “CDRL1”, “CDRL2”, and “CDRL3”.

[0068] Substitution of one or more CDR residues or omission of one or more CDRs is also possible. Antibodies have been described in the scientific literature in which one or two CDRs can be dispensed with for binding. Padlan et al. (1995 FASEB J. 9:133-139) analyzed the contact regions between antibodies and their antigens, based on published crystal structures, and concluded that only about one fifth to one third of CDR residues actually contact the antigen. Padlan also found many antibodies in which one or two CDRs had no amino acids in contact with an antigen (see also, Vaj dos et al. 2002 J Mol Biol 320:415-428).

[0069] CDR residues not contacting antigen can be identified based on previous studies (for example residues H60-H65 in CDRH2 are often not required), from regions of Kabat CDRs lying outside Chothia CDRs, by molecular modeling and/or empirically. If a CDR or residue(s) thereof is omitted, it is usually substituted with an amino acid occupying the corresponding position in another human antibody sequence or a consensus of such sequences. Positions for substitution within CDRs and amino acids to substitute can also be selected empirically.

[0070] The fully human monoclonal antibodies disclosed herein may comprise one or more amino acid substitutions, insertions and/or deletions in the framework and/or CDR regions of the heavy and light chain variable domains as compared to the corresponding germline sequences. Such mutations can be readily ascertained by comparing the amino acid sequences disclosed herein to germline sequences available from, for example, public antibody sequence databases. The present invention includes antibodies, and antigen-binding fragments thereof, which are derived from any of the amino acid sequences disclosed herein, wherein one or more amino acids within one or more framework and/or CDR regions are mutated to the corresponding residue(s) of the germline sequence from which the antibody was derived, or to the corresponding residue(s) of another human germline sequence, or to a conservative amino acid substitution of the corresponding germline residue(s) (such sequence changes are referred to herein collectively as “germline mutations”). A person of ordinary skill in the art, starting with the heavy and light chain variable region sequences disclosed herein, can easily produce numerous antibodies and antigen-binding fragments which comprise one or more individual germline mutations or combinations thereof. In certain embodiments, all of the framework and/or CDR residues within the V_{H} and/or V_{L} domains are mutated back to the residues found in the original germline sequence from which the antibody was derived. In other embodiments, only certain residues are mutated back to the original germline sequence, e.g., only the mutated residues found within the first 8 amino acids of FR1 or within the last 8 amino acids of FR4, or only the mutated residues found within CDR1, CDR2 or CDR3. In other embodiments, one or more of the framework and/or CDR residue(s) are mutated to the corresponding residue(s) of a different germline sequence (i.e., a germline sequence that is different from the germline sequence from which the antibody was originally derived). Furthermore, the antibodies of the present invention may contain any combination of two or more germline mutations within the framework and/or CDR regions, e.g., wherein certain individual residues are mutated to the corresponding residue of a particular germline sequence while certain other residues that differ from the original germline sequence are maintained or are mutated to the corresponding residue of a different germline sequence. Once obtained, antibodies and antigen-binding fragments that contain one or more germline mutations can be easily tested for one or more desired property such as, improved binding specificity, increased binding affinity, improved or enhanced antagonistic or agonistic biological properties (as the case may be), reduced immunogenicity, etc. Antibodies and antigen-binding fragments obtained in this general manner are encompassed within the present invention.

[0071] The present invention also includes fully monoclonal antibodies comprising variants of any of the CDR amino acid sequences disclosed herein having one or more conservative substitutions. For example, the present invention includes antibodies having CDR amino acid sequences with, e.g., 10 or fewer, 8 or fewer, 6 or fewer, 4 or fewer, etc. conservative amino acid substitutions relative to any of the CDR amino acid sequences disclosed herein.

[0072] The term “human antibody”, as used herein, is intended to include antibodies having variable and constant regions derived from human germline immunoglobulin sequences. The human mAbs of the invention may include amino acid residues not encoded by human germline immunoglobulin sequences (e.g., mutations introduced by random or site-specific mutagenesis in vitro or by somatic mutation in vivo), for example in the CDRs and in particular CDR3.

[0073] However, the term “human antibody”, as used herein, is not intended to include mAbs in which CDR sequences derived from the germline of another mammalian species (e.g., mouse), have been grafted onto human FR sequences.

[0074] The term “humanized antibody” refers to human antibody in which one or more CDRs of such antibody have been replaced with one or more corresponding CDRs obtained a non-human derived (e.g., mouse, rat, rabbit, primate) antibody. Humanized antibodies may also include certain non-CDR sequences or residues derived from such non-human antibodies as well as the one or more non-human CDR sequence. Such antibodies may also be referred to as “chimeric antibodies”.

[0075] The term “recombinant” generally refers to any protein, polypeptide, or cell expressing a gene of interest that is produced by genetic engineering methods. The term “recombinant” as used with respect to a protein or polypeptide, means a polypeptide produced by expression of a recombinant polynucleotide. The proteins used in the immunogenic compositions of the invention may be isolated from a natural source or produced by genetic engineering methods.

[0076] The antibodies of the invention may, in some embodiments, be recombinant human antibodies. The term “recombinant human antibody”, as used herein, is intended to include all antibodies, including human or humanized antibodies, that are prepared, expressed, created or isolated by recombinant means, such as antibodies expressed using a recombinant expression vector transfected into a host cell (described further below), antibodies isolated from a recombinant, combinatorial human antibody library (described further below), antibodies isolated from an animal (e.g., a mouse) that is transgenic for human immunoglobulin genes (see e.g., Taylor et al. (1992) Nucl. Acids Res. 20:6287-6295) or antibodies prepared, expressed, created or isolated by any other means that involves splicing of human immunoglobulin gene sequences to other DNA sequences. Such recombinant human antibodies have variable and constant regions derived from human germline immunoglobulin sequences. In certain embodiments, however, such recombinant human antibodies are subjected to in vitro mutagenesis (or, when an animal transgenic for human Ig sequences is used, in vivo somatic mutagenesis) and thus the amino acid sequences of the V_{H} and V_{L} regions of the recombinant antibodies are sequences that, while derived from and related to human germline V_{H} and V_{L} sequences, may not naturally exist within the human antibody germline repertoire in vivo.

[0077] The term “specifically binds,” or “binds specifically to”, or the like, means that an antibody or antigen-binding fragment thereof forms a complex with an antigen that is relatively stable under physiologic conditions. Specific binding can be characterized by an equilibrium dissociation constant of at least about 1×10⁻⁶ M or less (e.g., a smaller K_{D} denotes a tighter binding). Methods for determining whether two molecules specifically bind are well known in the art and include, for example, equilibrium dialysis, surface plasmon resonance, and the like. As described herein, antibodies have been identified by surface plasmon resonance, e.g., BIACORE™, biolayer interferometry measurements using, e.g., a ForteBio Octet HTX instrument (Pall Life Sciences), which bind specifically to RSV-F. Moreover, multi-specific antibodies that bind to RSV-F protein and one or more additional antigens, such as an antigen expressed by HMPV, or a bi-specific that binds to two different regions of RSV-F are nonetheless considered antibodies that “specifically bind”, as used herein. In certain embodiments, the antibodies disclosed herein display equilibrium dissociation constants (and hence specificities) of about 1×10⁻⁶ M; about 1×10⁻⁷M; about 1×10⁻⁸ M; about 1×10⁻⁹ M; about 1×10⁻¹⁰ M; between about 1×10⁻⁶ M and about 1×10⁻⁷ M; between about 1×10⁻⁷ M and about 1×10⁻⁸ M; between about 1×10⁻⁸ M and about 1×10⁻⁹ M; or between about 1×10⁻⁹ M and about 1×10⁻¹⁰ M.

[0078] The term “high affinity” antibody refers to those mAbs having a binding affinity to RSV-F and/or HMPV, expressed as K_{D}, of at least 10⁻⁹ M; more preferably 10⁻¹⁰ M, more preferably 10⁻¹¹ M, more preferably 10⁻¹² M as measured by surface plasmon resonance, e.g., BIACORE™, biolayer interferometry measurements using, e.g., a ForteBio Octet HTX instrument (Pall Life Sciences), or solution-affinity ELISA.

[0079] By the term “slow off rate”, “Koff” or “kd” is meant an antibody that dissociates from RSV-F, with a rate constant of 1×10⁻³ s⁻¹ or less, preferably 1×10⁻⁴ s⁻¹ or less, as determined by surface plasmon resonance, e.g., BIACORE™ or a ForteBio Octet HTX instrument (Pall Life Sciences).

[0080] The terms “antigen-binding portion” of an antibody, “antigen-binding fragment” of an antibody, and the like, as used herein, include any naturally occurring, enzymatically obtainable, synthetic, or genetically engineered polypeptide or glycoprotein that specifically binds an antigen to form a complex. In certain embodiments, the terms “antigen-binding portion” of an antibody, or “antibody fragment”, as used herein, refers to one or more fragments of an antibody that retains the ability to bind to RSV-F and/or HMPV.

[0081] An antibody fragment may include a Fab fragment, a F(ab′)₂ fragment, a Fv fragment, a dAb fragment, a fragment containing a CDR, or an isolated CDR. Antigen-binding fragments of an antibody may be derived, e.g., from full antibody molecules using any suitable standard techniques such as proteolytic digestion or recombinant genetic engineering techniques involving the manipulation and expression of DNA encoding antibody variable and (optionally) constant domains. Such DNA is known and/or is readily available from, e.g., commercial sources, DNA libraries (including, e.g., phage-antibody libraries), or can be synthesized. The DNA may be sequenced and manipulated chemically or by using molecular biology techniques, for example, to arrange one or more variable and/or constant domains into a suitable configuration, or to introduce codons, create cysteine residues, modify, add or delete amino acids, etc.

[0082] Non-limiting examples of antigen-binding fragments include: (i) Fab fragments; (ii) F(ab′)2 fragments; (iii) Fd fragments; (iv) Fv fragments; (v) single-chain Fv (scFv) molecules; (vi) dAb fragments; and (vii) minimal recognition units consisting of the amino acid residues that mimic the hypervariable region of an antibody (e.g., an isolated complementarity determining region (CDR) such as a CDR3 peptide), or a constrained FR3-CDR3-FR4 peptide. Other engineered molecules, such as domain-specific antibodies, single domain antibodies, domain-deleted antibodies, chimeric antibodies, CDR-grafted antibodies, diabodies, triabodies, tetrabodies, minibodies, nanobodies (e.g. monovalent nanobodies, bivalent nanobodies, etc.), small modular immunopharmaceuticals (SMIPs), and shark variable IgNAR domains, are also encompassed within the expression “antigen-binding fragment,” as used herein.

[0083] An antigen-binding fragment of an antibody will typically comprise at least one variable domain. The variable domain may be of any size or amino acid composition and will generally comprise at least one CDR, which is adjacent to or in frame with one or more framework sequences. In antigen-binding fragments having a V_{H} domain associated with a V_{L} domain, the V_{H} and V_{L} domains may be situated relative to one another in any suitable arrangement. For example, the variable region may be dimeric and contain V_{H}-V_{H}, V_{H}-V_{L} or V_{L}-V_{L} dimers. Alternatively, the antigen-binding fragment of an antibody may contain a monomeric V_{H} or V_{L} domain.

[0084] In certain embodiments, an antigen-binding fragment of an antibody may contain at least one variable domain covalently linked to at least one constant domain. Non-limiting, exemplary configurations of variable and constant domains that may be found within an antigen-binding fragment of an antibody of the present invention include: (i) V_{H}-C_{H}1; (ii) V_{H}-C_{H}2; V_{H}—C_{H}3; (iv) V_{H}-Cₕ2; (v) V_{H}-Cₕ1-Cₕ2-Cₕ3; (vi) V_{H}-C_{H}2-C_{H}3; (vii) V_{H}-C_{L}; V_{L}-C_{H}1; (ix) V_{L}-C_{H}2; (x) V_{L}-C_{H}3; (xi) V_{L}-C_{H}1-C_{H}2; (xii) V_{L}-C_{H}1-C_{H}2-C_{H}3; (xiii) V_{L}-C_{H}2-C_{H}3; and (xiv) V_{L}-C_{L}. In any configuration of variable and constant domains, including any of the exemplary configurations listed above, the variable and constant domains may be either directly linked to one another or may be linked by a full or partial hinge or linker region. A hinge region may consist of at least 2 (e.g., 5, 10, 15, 20, 40, 60 or more) amino acids, which result in a flexible or semi-flexible linkage between adjacent variable and/or constant domains in a single polypeptide molecule. Moreover, an antigen-binding fragment of an antibody of the present invention may comprise a homo-dimer or hetero-dimer (or other multimer) of any of the variable and constant domain configurations listed above in non-covalent association with one another and/or with one or more monomeric V_{H} or V_{L} domain (e.g., by disulfide bond(s)).

[0085] As with full antibody molecules, antigen-binding fragments may be mono-specific or multi-specific (e.g., bi-specific). A multi-specific antigen-binding fragment of an antibody will typically comprise at least two different variable domains, wherein each variable domain is capable of specifically binding to a separate antigen or to a different epitope on the same antigen. Any multi-specific antibody format, including the exemplary bi-specific antibody formats disclosed herein, may be adapted for use in the context of an antigen-binding fragment of an antibody of the present invention using routine techniques available in the art.

[0086] The specific embodiments, antibody or antibody fragments of the invention may be conjugated to a therapeutic moiety (“immunoconjugate”), such as an antibiotic, a second anti-RSV-F antibody, an anti-HMPV antibody, a vaccine, or a toxoid, or any other therapeutic moiety useful for treating an RSV infection and/or an HMPV infection.

[0087] An “isolated antibody”, as used herein, is intended to refer to an antibody that is substantially free of other antibodies (Abs) having different antigenic specificities (e.g., an isolated antibody that specifically binds RSV-F and/or HMPV, or a fragment thereof, is substantially free of Abs that specifically bind antigens other than RSV-F and/or HMPV.

[0088] A “blocking antibody” or a “neutralizing antibody”, as used herein (or an “antibody that neutralizes RSV-F and/or HMPV activity”), is intended to refer to an antibody whose binding to RSV-F or to an HMPV antigen, as the case may be as disclosed herein, results in inhibition of at least one biological activity of RSV-F and/or HMPV. For example, an antibody of the invention may aid in blocking the fusion of RSV and/or HMPV to a host cell, or prevent syncytia formation, or prevent the primary disease caused by RSV and/or HMPV. Alternatively, an antibody of the invention may demonstrate the ability to ameliorate at least one symptom of the RSV infection and or HMPV infection. This inhibition of the biological activity of RSV-F and/or HMPV can be assessed by measuring one or more indicators of RSV-F and/or HMPV biological activity by one or more of several standard in vitro assays (such as a neutralization assay, as described herein) or in vivo assays known in the art (for example, animal models to look at protection from challenge with RSV and/or HMPV following administration of one or more of the antibodies described herein).

[0089] The term “surface plasmon resonance”, as used herein, refers to an optical phenomenon that allows for the analysis of real-time biomolecular interactions by detection of alterations in protein concentrations within a biosensor matrix, for example using the BIACORE™ system (Pharmacia Biosensor AB, Uppsala, Sweden and Piscataway, N.J.).

[0090] The term “K_{D}”, as used herein, is intended to refer to the equilibrium dissociation constant of a particular antibody-antigen interaction.

[0091] The term “epitope” refers to an antigenic determinant that interacts with a specific antigen binding site in the variable region of an antibody molecule known as a paratope. A single antigen may have more than one epitope. Thus, different antibodies may bind to different areas on an antigen and may have different biological effects. The term “epitope” also refers to a site on an antigen to which B and/or T cells respond. It also refers to a region of an antigen that is bound by an antibody. Epitopes may be defined as structural or functional. Functional epitopes are generally a subset of the structural epitopes and have those residues that directly contribute to the affinity of the interaction. Epitopes may also be conformational, that is, composed of non-linear amino acids. In certain embodiments, epitopes may include determinants that are chemically active surface groupings of molecules such as amino acids, sugar side chains, phosphoryl groups, or sulfonyl groups, and, in certain embodiments, may have specific three-dimensional structural characteristics, and/or specific charge characteristics.

[0092] The term “substantial identity”, or “substantially identical,” when referring to a nucleic acid or fragment thereof, indicates that, when optimally aligned with appropriate nucleotide insertions or deletions with another nucleic acid (or its complementary strand), there is nucleotide sequence identity in at least about 90%, and more preferably at least about 95%, 96%, 97%, 98% or 99% of the nucleotide bases, as measured by any well-known algorithm of sequence identity, such as FASTA, BLAST or GAP, as discussed below. Accordingly, nucleic acid sequences that display a certain percentage “identity” share that percentage identity, and/or are that percentage “identical” to one another. A nucleic acid molecule having substantial identity to a reference nucleic acid molecule may, in certain instances, encode a polypeptide having the same or substantially similar amino acid sequence as the polypeptide encoded by the reference nucleic acid molecule.

[0093] In certain embodiments, the disclosed antibody nucleic acid sequences are, e.g, at least 70% identical; at least 75% identical; 80% identical; at least 85% identical; at least 90% identical; at least 95% identical; at least 96% identical; at least 97% identical; at least 98% identical; at least 99%; and/or all percentages of identity in between; to other sequences and/or share such percentage identities with one another (or with certain subsets of the herein-disclosed antibody sequences).

[0094] In other embodiments, the disclosed antibody nucleic acid sequences are, e.g, at least 70% identical; at least 75% identical; 80% identical; at least 85% identical; at least 90% identical; at least 95% identical; at least 96% identical; at least 97% identical; at least 98% identical; at least 99% identical; or 100% identical; and/or all percentages of identity in between; to other sequences and/or share such percentage identities with one another (or with certain subsets of the herein-disclosed antibody sequences).

[0095] As applied to polypeptides, the term “substantial identity” or “substantially identical” means that two peptide sequences, when optimally aligned, such as by the programs GAP or BESTFIT using default gap weights, share at least 90% sequence identity, even more preferably at least 95%, 98% or 99% sequence identity. Accordingly, amino acid sequences that display a certain percentage “identity” share that percentage identity, and/or are that percentage “identical” to one another. Accordingly, amino acid sequences that display a certain percentage “identity” share that percentage identity, and/or are that percentage “identical” to one another.

[0096] In certain embodiments, the disclosed antibody amino acid sequences are, e.g, at least 70% identical; at least 75% identical; 80% identical; at least 85% identical; at least 90% identical; at least 95% identical; at least 96% identical; at least 97% identical; at least 98% identical; at least 99%; and/or all percentages of identity in between; to other sequences and/or share such percentage identities with one another (or with certain subsets of the herein-disclosed antibody sequences).

[0097] In other embodiments, the disclosed antibody amino acid sequences are, e.g, at least 70% identical; at least 75% identical; 80% identical; at least 85% identical; at least 90% identical; at least 95% identical; at least 96% identical; at least 97% identical; at least 98% identical; at least 99% identical; or 100% identical; and/or all percentages of identity in between; to other sequences and/or share such percentage identities with one another (or with certain subsets of the herein-disclosed antibody sequences).

[0098] Preferably, residue positions, which are not identical, differ by conservative amino acid substitutions. A “conservative amino acid substitution” is one in which an amino acid residue is substituted by another amino acid residue having a side chain (R group) with similar chemical properties (e.g., charge or hydrophobicity). In general, a conservative amino acid substitution will not substantially change the functional properties of a protein. In cases where two or more amino acid sequences differ from each other by conservative substitutions, the percent or degree of similarity may be adjusted upwards to correct for the conservative nature of the substitution. Means for making this adjustment are well known to those of skill in the art. (See, e.g., Pearson (1994) Methods Mol. Biol. 24: 307-331). Examples of groups of amino acids that have side chains with similar chemical properties include 1) aliphatic side chains: glycine, alanine, valine, leucine and isoleucine; 2) aliphatic-hydroxyl side chains: serine and threonine; 3) amide-containing side chains: asparagine and glutamine; 4) aromatic side chains: phenylalanine, tyrosine, and tryptophan; 5) basic side chains: lysine, arginine, and histidine; 6) acidic side chains: aspartate and glutamate, and 7) sulfur-containing side chains: cysteine and methionine. Preferred conservative amino acids substitution groups are: valine-leucine-isoleucine, phenylalanine-tyrosine, lysine-arginine, alanine-valine, glutamate-aspartate, and asparagine-glutamine. Alternatively, a conservative replacement is any change having a positive value in the PAM250 log-likelihood matrix disclosed in Gonnet et al. (1992) Science 256: 1443 45. A “moderately conservative” replacement is any change having a nonnegative value in the PAM250 log-likelihood matrix.

[0099] Sequence similarity for polypeptides is typically measured using sequence analysis software. Protein analysis software matches similar sequences using measures of similarity assigned to various substitutions, deletions and other modifications, including conservative amino acid substitutions. For instance, GCG software contains programs such as GAP and BESTFIT which can be used with default parameters to determine sequence homology or sequence identity between closely related polypeptides, such as homologous polypeptides from different species of organisms or between a wild type protein and a mutein thereof. See, e.g., GCG Version 6.1. Polypeptide sequences also can be compared using FASTA with default or recommended parameters; a program in GCG Version 6.1. FASTA {e.g., FASTA2 and FASTA3) provides alignments and percent sequence identity of the regions of the best overlap between the query and search sequences (Pearson (2000) supra). Another preferred algorithm when comparing a sequence of the invention to a database containing a large number of sequences from different organisms is the computer program BLAST, especially BLASTP or TBLASTN, using default parameters. (See, e.g., Altschul et al. (1990) J. Mol. Biol. 215: 403 410 and (1997) Nucleic Acids Res. 25:3389 402).

[0100] In certain embodiments, the antibody or antibody fragment for use in the method of the invention may be mono-specific, bi-specific, or multi-specific. Multi-specific antibodies may be specific for different epitopes of one target polypeptide or may contain antigen-binding domains specific for epitopes of more than one target polypeptide. An exemplary bi-specific antibody format that can be used in the context of the present invention involves the use of a first immunoglobulin (Ig) C_{H}3 domain and a second Ig C_{H}3 domain, wherein the first and second Ig C_{H}3 domains differ from one another by at least one amino acid, and wherein at least one amino acid difference reduces binding of the bi-specific antibody to Protein A as compared to a bi-specific antibody lacking the amino acid difference. In one embodiment, the first Ig C_{H}3 domain binds Protein A and the second Ig C_{H}3 domain contains a mutation that reduces or abolishes Protein A binding such as an H95R modification (by IMGT exon numbering; H435R by EU numbering). The second C_{H}3 may further comprise an Y96F modification (by IMGT; Y436F by EU). Further modifications that may be found within the second C_{H}3 include: D16E, L18M, N44S, K52N, V57M, and V82I (by IMGT; D356E, L358M, N384S, K392N, V397M, and V422I by EU) in the case of IgG1 mAbs; N44S, K52N, and V82I (IMGT; N384S, K392N, and V422I by EU) in the case of IgG2 mAbs; and Q15R, N44S, K52N, V57M, R69K, E79Q, and V82I (by IMGT; Q355R, N384S, K392N, V397M, R409K, E419Q, and V422I by EU) in the case of IgG4 mAbs. Variations on the bi-specific antibody format described above are contemplated within the scope of the present invention.

[0101] By the phrase “therapeutically effective amount” is meant an amount that produces the desired effect for which it is administered. The exact amount will depend on the purpose of the treatment, and will be ascertainable by one skilled in the art using known techniques (see, for example, Lloyd (1999) The Art, Science and Technology of Pharmaceutical Compounding).

[0102] An “immunogenic composition” relates to a composition containing an antigen/immunogen, e.g., a microorganism, such as a virus or a bacterium, or a component thereof, a protein, a polypeptide, a fragment of a protein or polypeptide, a whole cell inactivated, subunit or attenuated virus, or a polysaccharide, or combination thereof, administered to stimulate the recipient's humoral and/or cellular immune systems to one or more of the antigens/immunogens present in the immunogenic composition. The immunogenic compositions of the present invention can be used to treat a human susceptible to RSV and/or HMPV infection or suspected of having or being susceptible to RSV and/or HMPV infection, by means of administering the immunogenic compositions via a systemic route. These administrations can include injection via the intramuscular (i.m.), intradermal (i.d.), intranasal or inhalation route, or subcutaneous (s.c.) routes; application by a patch or other transdermal delivery device. In one embodiment, the immunogenic composition may be used in the manufacture of a vaccine or in the elicitation of polyclonal or monoclonal antibodies that could be used to passively protect or treat a mammal.

[0103] The terms “vaccine” or “vaccine composition”, which are used interchangeably, refer to a composition comprising at least one immunogenic composition that induces an immune response in an animal.

[0104] In certain embodiments, a protein of interest comprises an antigen. The terms “antigen,” “immunogen,” “antigenic,” “immunogenic,” “antigenically active,” and “immunologically active” when made in reference to a molecule, refer to any substance that is capable of inducing a specific humoral and/or cell-mediated immune response. In one embodiment, the antigen comprises an epitope, as defined above.

[0105] “Immunologically protective amount”, as used herein, is an amount of an antigen effective to induce an immunogenic response in the recipient that is adequate to prevent or ameliorate signs or symptoms of disease, including adverse health effects or complications thereof. Either humoral immunity or cell-mediated immunity or both can be induced. The immunogenic response of an animal to a composition can be evaluated, e.g., indirectly through measurement of antibody titers, lymphocyte proliferation assays, or directly through monitoring signs and symptoms after challenge with the microorganism. The protective immunity conferred by an immunogenic composition or vaccine can be evaluated by measuring, e.g., reduction of shed of challenge organisms, reduction in clinical signs such as mortality, morbidity, temperature, and overall physical condition, health and performance of the subject. The immune response can comprise, without limitation, induction of cellular and/or humoral immunity. The amount of a composition or vaccine that is therapeutically effective can vary, depending on the particular organism used, or the condition of the animal being treated or vaccinated.

[0106] An “immune response”, or “immunological response” as used herein, in a subject refers to the development of a humoral immune response, a cellular-immune response, or a humoral and a cellular immune response to an antigen/immunogen. A “humoral immune response” refers to one that is at least in part mediated by antibodies. A “cellular immune response” is one mediated by T-lymphocytes or other white blood cells or both, and includes the production of cytokines, chemokines and similar molecules produced by activated T-cells, white blood cells, or both. Immune responses can be determined using standard immunoassays and neutralization assays, which are known in the art.

[0107] “Immunogenicity”, as used herein, refers to the capability of a protein or polypeptide to elicit an immune response directed specifically against a bacteria or virus that causes the identified disease.

[0108] Unless specifically indicated otherwise, the term “antibody,” as used herein, shall be understood to encompass antibody molecules comprising two immunoglobulin heavy chains and two immunoglobulin light chains (i.e., “full antibody molecules”) as well as antigen-binding fragments thereof. The terms “antigen-binding portion” of an antibody, “antigen-binding fragment” of an antibody, and the like, as used herein, include any naturally occurring, enzymatically obtainable, synthetic, or genetically engineered polypeptide or glycoprotein that specifically binds an antigen to form a complex.

### Preparation of Human Antibodies

[0109] As disclosed herein, anti-RSV and or anti-RSV/anti-HMPF cross neutralizing antibodies by be obtained through B cell sorting techniques available to the artisan, and, for example, as described in the EXAMPLES below. Methods for generating human antibodies in transgenic mice are also known in the art and may be employed in order to derive antibodies in accordance with the present disclosure. Any such known methods can be used in the context of the present invention to make human antibodies that specifically bind to RSV-F (see, for example, U.S. Pat. No. 6,596,541).

[0110] In certain embodiments, the antibodies of the instant invention possess affinities (K_{D}) ranging from about 1.0×10⁻⁷ M to about 1.0×10¹²M, when measured by binding to antigen either immobilized on solid phase or in solution phase. In certain embodiments, the antibodies of the invention possess affinities (K_{D}) ranging from about 1×10⁻⁷ M to about 6×10⁻¹⁰ M, when measured by binding to antigen either immobilized on solid phase or in solution phase. In certain embodiments, the antibodies of the invention possess affinities (K_{D}) ranging from about 1×10⁻⁷ M to about 9×10⁻¹⁰ M, when measured by binding to antigen either immobilized on solid phase or in solution phase.

[0111] The anti-RSV-F and/or anti-HMPV antibodies and antibody fragments disclosed herein encompass proteins having amino acid sequences that vary from those of the described antibodies, but that retain the ability to bind RSV-F. Such variant antibodies and antibody fragments comprise one or more additions, deletions, or substitutions of amino acids when compared to parent sequence, but exhibit biological activity that is essentially equivalent to that of the described antibodies. Likewise, the antibody-encoding DNA sequences of the present invention encompass sequences that comprise one or more additions, deletions, or substitutions of nucleotides when compared to the disclosed sequence, but that encode an antibody or antibody fragment that is essentially bioequivalent to an antibody or antibody fragment of the invention.

[0112] Two antigen-binding proteins, or antibodies, are considered bioequivalent if, for example, they are pharmaceutical equivalents or pharmaceutical alternatives whose rate and extent of absorption do not show a significant difference when administered at the same molar dose under similar experimental conditions, either single does or multiple dose. Some antibodies will be considered equivalents or pharmaceutical alternatives if they are equivalent in the extent of their absorption but not in their rate of absorption and yet may be considered bioequivalent because such differences in the rate of absorption are intentional and are reflected in the labeling, are not essential to the attainment of effective body drug concentrations on, e.g., chronic use, and are considered medically insignificant for the particular drug product studied.

[0113] In one embodiment, two antigen-binding proteins are bioequivalent if there are no clinically meaningful differences in their safety, purity, and potency.

[0114] In one embodiment, two antigen-binding proteins are bioequivalent if a patient can be switched one or more times between the reference product and the biological product without an expected increase in the risk of adverse effects, including a clinically significant change in immunogenicity, or diminished effectiveness, as compared to continued therapy without such switching.

[0115] In one embodiment, two antigen-binding proteins are bioequivalent if they both act by a common mechanism or mechanisms of action for the condition or conditions of use, to the extent that such mechanisms are known.

[0116] Bioequivalence may be demonstrated by in vivo and/or in vitro methods. Bioequivalence measures include, e.g., (a) an in vivo test in humans or other mammals, in which the concentration of the antibody or its metabolites is measured in blood, plasma, serum, or other biological fluid as a function of time; (b) an in vitro test that has been correlated with and is reasonably predictive of human in vivo bioavailability data; (c) an in vivo test in humans or other mammals in which the appropriate acute pharmacological effect of the antibody (or its target) is measured as a function of time; and (d) in a well-controlled clinical trial that establishes safety, efficacy, or bioavailability or bioequivalence of an antibody.

[0117] Bioequivalent variants of the antibodies of the invention may be constructed by, for example, making various substitutions of residues or sequences or deleting terminal or internal residues or sequences not needed for biological activity. For example, cysteine residues not essential for biological activity can be deleted or replaced with other amino acids to prevent formation of unnecessary or incorrect intramolecular disulfide bridges upon renaturation. In other contexts, bioequivalent antibodies may include antibody variants comprising amino acid changes, which modify the glycosylation characteristics of the antibodies, e.g., mutations that eliminate or remove glycosylation.

### Biological and Biophysical Characteristics of the Antibodies

[0118] In certain embodiments, the inventive antibodies and antigen-binding fragments thereof specifically bind to Respiratory Syncytial Virus (RSV) F protein (F), wherein at least one of the CDRH1, CDRH2, CDRH3, CDRL1, CDRL2, and/or CDRL3 amino acid sequences of such antibody or the antigen-binding fragment thereof is at least 70% identical; at least 75% identical; 80% identical; at least 85% identical; at least 90% identical; at least 95% identical; at least 96% identical; at least 97% identical; at least 98% identical; at least 99% identical; or 100% identical, and/or all percentages of identity in between; to at least one of the CDRH1, a CDRH2, a CDRH3, a CDRL1, a CDRL2, and/or a CDRL3 amino acid sequences as disclosed in Table 6 of an antibody selected from Antibody Number 1 through Antibody Number 123 as disclosed in Table 6. In certain embodiments, such antibodies also possess at least one, two, three, four, five, six, seven, eight, nine, ten, or more characteristics disclosed in the immediately following eleven paragraphs.

[0119] Without wishing to be bound by any theory, it is believed that the inventive antibodies and antigen-binding fragments thereof may function by binding to RSV-F, preferably in the PreF conformation, and in so doing act to block the fusion of the viral membrane with the host cell membrane. The antibodies of the present invention may also function by binding to RSV-F and in so doing block the cell to cell spread of the virus and block syncytia formation associated with RSV infection of cells. Advantageously, both RSV subtype A and RSV subtype B are effectively blocked, or neutralized, by the majority of the anti-RSV antibodies disclosed herein.

[0120] In certain embodiments, the inventive antibodies and antigen-binding fragment thereof display better binding affinity for the PreF form of RSV-F relative to the PostF form of RSV-F.

[0121] In certain other embodiments, the inventive antibodies and antigen-binding fragments thereof advantageously display a clean or low polyreactivity profile (see, e.g., WO 2014/179363 and Xu et al., Protein Eng Des Sel, October; 26(10):663-70), and are thus particularly amenable to development as safe, efficacious, and developable therapeutic and/or prophylactic anti-RSV and/or HMPV treatments.

[0122] In certain embodiments, the inventive antibodies and antigen-binding fragments thereof, without wishing to be bound by any theory, may function by blocking or inhibiting RSV fusion to the cell membrane by binding to any one or more of, e.g., antigenic Sites ø, I, II, III, IV, or Site V of the PreF conformation of the F protein. In certain embodiments, the inventive antibodies display antigenic site specificity for Site ø, Site V, or Site III of PreF relative to RSV-F Site I, Site II, or Site IV.

[0123] In certain embodiments, at least a portion of the epitope with which the inventive antibodies and antigen-binding fragments thereof interacts comprises a portion of the α3 helix and β3/β4 hairpin of PreF. In certain embodiments, substantially all of the epitope of such antibodies comprises the α3 helix and β3/β4 hairpin of PreF. In still further embodiments, the inventive antibodies cross-compete with antibodies that recognize a portion or substantially all of the α3 helix and β3/β4 hairpin of PreF.

[0124] In certain embodiments, the inventive antibodies and antigen-binding fragments thereof display an in vitro neutralization potency (IC₅₀) of between about 0.5 microgram/milliliter (μg/ml) to about 5 μg/ml; between about 0.05 μg/ml to about 0.5 μg/ml; or less than about 0.05 mg/ml.

[0125] In certain embodiments, the binding affinity and/or epitopic specificity of the inventive antibodies and antigen-binding fragments thereof for any one of the RSV-F variants designated as 1, 2, 3, 4, 5, 6, 7, 8, 9, and DG in FIG. 7A is reduced or eliminated relative to the binding affinity and/or epitopic specificity of said antibody or antigen-binding fragment thereof for the RSV-F or RSV-F DS-Cav1.

[0126] In certain embodiments, the inventive antibodies and antigen-binding fragments thereof display a cross-neutralization potency (IC₅₀) against human metapneumovirus (HMPV) as well as RSV. In certain such embodiments, the inventive antibodies and antigen-binding fragments thereof comprise at least one of the CDRH1, CDRH2, CDRH3, CDRL1, CDRL2, and/or CDRL3 amino acid sequences of such antibody or the antigen-binding fragment thereof is at least 70% identical; at least 75% identical; 80% identical; at least 85% identical; at least 90% identical; at least 95% identical; at least 96% identical; at least 97% identical; at least 98% identical; at least 99% identical; or 100% identical; and/or all percentages of identity in between; to at least one of the CDRH1, a CDRH2, a CDRH3, a CDRL1, a CDRL2, and/or a CDRL3 amino acid sequences as disclosed in Table 6 of an antibody selected from the group consisting of Antibody Number 4, 11, and 62 as disclosed in Table 6.

[0127] In certain embodiments, the inventive antibodies and antigen-binding fragments thereof do not complete with D25, MPE8, palivisumab, motavizumab, or AM-14. In certain embodiments, the inventive antibodies and antigen-binding fragments thereof do not complete with D25, MPE8, palivisumab, or motavizumab. In certain embodiments, the inventive antibodies and antigen-binding fragments thereof do not complete with MPE8, palivisumab, or motavizumab. In certain embodiments, the inventive antibodies and antigen-binding fragments thereof do not complete with D25, palivisumab, or motavizumab. In certain embodiments, the inventive antibodies and antigen-binding fragments thereof do not complete with D25. In certain embodiments, the inventive antibodies and antigen-binding fragments thereof do not complete with MPE8. In certain embodiments, the inventive antibodies and antigen-binding fragments thereof do not complete with palivisumab. In certain embodiments, the inventive antibodies and antigen-binding fragments thereof do not complete with motavizumab.

[0128] In certain embodiments, the inventive antibodies and antigen-binding fragments thereof complete with one or more of D25, MPE8, palivisumab, motavizumab, and/or AM-14.

[0129] In certain embodiments, the inventive antibodies and antigen-binding fragments thereof display at least about 2-fold; at least about 3-fold; at least about 4-fold; at least about 5-fold; at least about 6-fold; at least about 7-fold; at least about 8-fold; at least about 9-fold; at least about 10-fold; at least about 15-fold; at least about 20-fold; at least about 25-fold; at least about 30-fold; at least about 35-fold; at least about 40-fold; at least about 50-fold; at least about 55-fold; at least about 60-fold; at least about 70-fold; at least about 80-fold; at least about 90-fold; at least about 100-fold; greater than about 100-fold; and folds in between any of the foregoing; greater neutralization potency (IC₅₀) than D25 and/or palivizumab.

[0130] In certain embodiments, the inventive antibodies and antigen-binding fragments thereof comprise the CDRH3 amino acid sequence of any one of the antibodies designated Antibody Number 1 through Antibody Number 123 as disclosed in Table 6.

[0131] In certain embodiments, the inventive antibodies and antigen-binding fragments thereof comprise the CDRH2 amino acid sequence of any one of the antibodies designated Antibody Number 1 through Antibody Number 123 as disclosed in Table 6.

[0132] In certain embodiments, the inventive antibodies and antigen-binding fragments thereof comprise the CDRH1 amino acid sequence of any one of the antibodies designated Antibody Number 1 through Antibody Number 123 as disclosed in Table 6.

[0133] In certain embodiments, the inventive antibodies and antigen-binding fragments thereof comprise the CDRL3 amino acid sequence of any one of the antibodies designated Antibody Number 1 through Antibody Number 123 as disclosed in Table 6.

[0134] In certain embodiments, the inventive antibodies and antigen-binding fragments thereof comprise the CDRL2 amino acid sequence of any one of the antibodies designated Antibody Number 1 through Antibody Number 123 as disclosed in Table 6.

[0135] In certain embodiments, the inventive antibodies and antigen-binding fragments thereof comprise the CDRL1 amino acid sequence of any one of the antibodies designated Antibody Number 1 through Antibody Number 123 as disclosed in Table 6.

[0136] In certain embodiments, the inventive antibodies and antigen-binding fragments thereof comprise any combination of two, three, four, five, or six characteristics disclosed in the immediately preceding paragraphs, i.e., a) the anti-RSV F antibody cross-competes with an antibody selected from Antibody Number 1 through Antibody Number 123 as disclosed in Table 6 for binding to RSV-F; b) the anti-RSV F antibody displays better binding affinity for the PreF form of RSV-F relative to the PostF form of RSV-F; c) the anti-RSV F antibody displays a clean or low polyreactivity profile; d) the anti-RSV F antibody displays neutralization activity toward RSV subtype A and RSV subtype B in vitro; e) the anti-RSV F antibody displays antigenic site specificity for RSV-F at Site ø, Site I, Site II, Site III, Site IV, or Site V; f) the anti-RSV F antibody displays antigenic site specificity for RSV-F Site ø, Site V, or Site III relative to RSV-F Site I, Site II, or Site IV; g) at least a portion of the epitope with which the anti-RSV F antibody interacts comprises the α3 helix and β3/β4 hairpin of PreF; h) the anti-RSV F antibody displays an in vitro neutralization potency (IC₅₀) of between about 0.5 microgram/milliliter (μg/ml) to about 5 μg/ml; between about 0.05 μg/ml to about 0.5 μg/ml; or less than about 0.05 mg/ml; i) the binding affinity and/or epitopic specificity of the anti-RSV F antibody for any one of the RSV-F variants designated as 1, 2, 3, 4, 5, 6, 7, 8, 9, and DG in FIG. 7A is reduced or eliminated relative to the binding affinity and/or epitopic specificity of anti-RSV F antibody for RSV-F or RSV-F DS-Cav1; j) the anti-RSV F antibody displays a cross-neutralization potency (IC₅₀) against human metapneumovirus (HMPV); k) the anti-RSV F antibody does not complete with D25, MPE8, palivisumab, motavizumab, or AM-14; or 1) the anti-RSV F antibody displays at least about 2-fold; at least about 3-fold; at least about 4-fold; at least about 5-fold; at least about 6-fold; at least about 7-fold; at least about 8-fold; at least about 9-fold; at least about 10-fold; at least about 15-fold; at least about 20-fold; at least about 25-fold; at least about 30-fold; at least about 35-fold; at least about 40-fold; at least about 50-fold; at least about 55-fold; at least about 60-fold; at least about 70-fold; at least about 80-fold; at least about 90-fold; at least about 100-fold; greater than about 100-fold; and folds in between any of the foregoing; greater neutralization potency (IC₅₀) than D25 and/or palivizumab.

[0137] In certain embodiments, the inventive antibodies and antigen-binding fragments thereof comprise a heavy chain (HC) amino acid sequence of any one of the antibodies designated Antibody Number 1 through Antibody Number 123 as disclosed in Table 6. In certain embodiments, the inventive antibodies and antigen-binding fragments thereof comprise a light chain (LC) amino acid sequence of any one of the antibodies designated Antibody Number 1 through Antibody Number 123 as disclosed in Table 6. In certain embodiments, the inventive antibodies and antigen-binding fragments thereof comprise a heavy chain (HC) amino acid sequence and a light chain (LC) amino acid sequence of any one of the antibodies designated Antibody Number 1 through Antibody Number 123 as disclosed in Table 6.

[0138] In certain embodiments, the inventive antibodies and antigen-binding fragments thereof are each selected from the group consisting antibodies that are at least 70% identical; at least 75% identical; 80% identical; at least 85% identical; at least 90% identical; at least 95% identical; at least 96% identical; at least 97% identical; at least 98% identical; at least 99% identical; or 100% identical; and/or all percentages of identity in between; to any one of the antibodies designated as Antibody Number 1 through Antibody Number 123 as disclosed in Table 6.

[0139] In certain embodiments, the inventive antibodies and antigen-binding fragments thereof comprise are each selected from the group consisting of the antibodies designated as Antibody Number 1 through Antibody Number 123 as disclosed in Table 6.

[0140] In certain embodiments, isolated nucleic acid sequences are provided that encode antibodies or antigen binding fragments thereof that specifically bind to Respiratory Syncytial Virus (RSV) F protein and antigen-binding fragments thereof, wherein at least one of the CDRH1, CDRH2, CDRH3, CDRL1, CDRL2, and/or CDRL3 amino acid sequences of the antibody or the antigen-binding fragment thereof is at least 70% identical; at least 75% identical; 80% identical; at least 85% identical; at least 90% identical; at least 95% identical; at least 96% identical; at least 97% identical; at least 98% identical; at least 99% identical; or at least 100% identical and/or all percentages of identity in between; to at least one the CDRH1, CDRH2, CDRH3, CDRL1, CDRL2, and/or CDRL3 amino acid sequences as disclosed in Table 6 of an antibody selected from Antibody Number 1 through Antibody Number 123 as disclosed in Table 6. In certain embodiments, such nucleic acid sequences are selected from those nucleic acid sequences that are disclosed in Table 6, and compliments thereof.

[0141] In certain embodiments, isolated nucleic acid sequences are provided that encode the inventive antibodies and antigen-binding fragments thereof, wherein such nucleic acid sequences comprise sequences that encode the CDRH3 amino acid sequence of the antibodies designated Antibody Number 1 through Antibody Number 123 as disclosed in Table 6. In certain embodiments, such nucleic acid sequences are selected from those nucleic acid sequences that are disclosed in Table 6, and compliments thereof.

[0142] In certain embodiments, isolated nucleic acid sequences are provided that encode the inventive antibodies and antigen-binding fragments thereof, wherein such nucleic acid sequences comprise sequences that encode the CDRH2 amino acid sequences of the antibodies designated Antibody Number 1 through Antibody Number 123 as disclosed in Table 6. In certain embodiments, such nucleic acid sequences are selected from those nucleic acid sequences that are disclosed in Table 6, and compliments thereof.

[0143] In certain embodiments, isolated nucleic acid sequences are provided that encode the inventive antibodies and antigen-binding fragments thereof, wherein such nucleic acid sequences comprise sequences that encode the CDRH1 amino acid sequences of the antibodies designated Antibody Number 1 through Antibody Number 123 as disclosed in Table 6. In certain embodiments, such nucleic acid sequences are selected from those nucleic acid sequences that are disclosed in Table 6, and compliments thereof.

[0144] In certain embodiments, isolated nucleic acid sequences are provided that encode the inventive antibodies and antigen-binding fragments thereof, wherein such nucleic acid sequences comprise sequences that encode the CDRL3 amino acid sequences of the antibodies designated Antibody Number 1 through Antibody Number 123 as disclosed in Table 6. In certain embodiments, such nucleic acid sequences are selected from those nucleic acid sequences that are disclosed in Table 6, and compliments thereof.

[0145] In certain embodiments, isolated nucleic acid sequences are provided that encode the inventive antibodies and antigen-binding fragments thereof, wherein such nucleic acid sequences comprise sequences that encode the CDRL2 amino acid sequences of the antibodies designated Antibody Number 1 through Antibody Number 123 as disclosed in Table 6. In certain embodiments, such nucleic acid sequences are selected from those nucleic acid sequences that are disclosed in Table 6, and compliments thereof.

[0146] In certain embodiments, isolated nucleic acid sequences are provided that encode the inventive antibodies and antigen-binding fragments thereof, wherein such nucleic acid sequences comprise sequences that encode the CDRL1 amino acid sequences of the antibodies designated Antibody Number 1 through Antibody Number 123 as disclosed in Table 6. In certain embodiments, such nucleic acid sequences are selected from those nucleic acid sequences that are disclosed in Table 6, and compliments thereof.

[0147] In certain embodiments, isolated nucleic acid sequences are provided that encode the inventive antibodies and antigen-binding fragments thereof, wherein such nucleic acid sequences comprise sequences that encode the CDRL1, CDRL2, CDRL3, CDRH1, CDRH2, and CDRH3 amino acid sequences of the antibodies designated Antibody Number 1 through Antibody Number 123 as disclosed in Table 6, i.e., have identity across six CDRs with one of the antibodies of the invention.

[0148] In certain embodiments, isolated nucleic acid sequences are provided that encode the inventive antibodies and antigen-binding fragments thereof, wherein such nucleic acid sequences comprise sequences that encode the heavy chain (HC) amino acid sequences of the antibodies designated Antibody Number 1 through Antibody Number 123 as disclosed in Table 6. In certain embodiments, such nucleic acid sequences are selected from those nucleic acid sequences that are disclosed in Table 6, and compliments thereof.

[0149] In certain embodiments, isolated nucleic acid sequences are provided that encode the inventive antibodies and antigen-binding fragments thereof, wherein such nucleic acid sequences comprise sequences that encode the HC CDR amino acid sequences of the antibodies designated Antibody Number 1 through Antibody Number 123 as disclosed in Table 6. In certain embodiments, such nucleic acid sequences are selected from those nucleic acid sequences that are disclosed in Table 6, and compliments thereof.

[0150] In certain embodiments, isolated nucleic acid sequences are provided that encode the inventive antibodies and antigen-binding fragments thereof, wherein such nucleic acid sequences comprise sequences that encode the light chain (LC) amino acid sequences of the antibodies designated Antibody Number 1 through Antibody Number 123 as disclosed in Table 6. In certain embodiments, such nucleic acid sequences are selected from those nucleic acid sequences that are disclosed in Table 6, and compliments thereof.

[0151] In certain embodiments, isolated nucleic acid sequences are provided that encode the inventive antibodies and antigen-binding fragments thereof, wherein such nucleic acid sequences comprise sequences that encode the LC CDR amino acid sequences of the antibodies designated Antibody Number 1 through Antibody Number 123 as disclosed in Table 6. In certain embodiments, such nucleic acid sequences are selected from those nucleic acid sequences that are disclosed in Table 6, and compliments thereof.

[0152] In certain embodiments, isolated nucleic acid sequences are provided that encode the inventive antibodies and antigen-binding fragments thereof, wherein such nucleic acid sequences comprise sequences are each selected from the group consisting of sequences that are at least 70% identical; at least 75% identical; 80% identical; at least 85% identical; at least 90% identical; at least 95% identical; at least 96% identical; at least 97% identical; at least 98% identical; at least 99% identical; at least 100% identical, and/or all percentages of identity in between; to any one of the nucleic acid sequences that are disclosed in Table 6, and compliments thereof.

[0153] In certain embodiments, the nucleic acid sequences of the invention may be modified according to methods known in the art. In other embodiments, the nucleic acid sequences of the invention may be present in or complexed with an art recognized carrier, e.g., a lipid nanoparticle, a polymeric nanomicelle, a linear or branched polymer or a lipid/lipid-like material.

[0154] In certain embodiments, expression vectors are provided comprising the isolated nucleic acid sequences disclose herein and throughout, and in particular in the immediately preceding paragraphs.

[0155] In certain embodiments, host cells transfected, transformed, or transduced with the nucleic acid sequences and/or the expression vectors disclosed immediately above are provided.

### Epitope Mapping and Related Technologies

[0156] As described above and as demonstrated in the EXAMPLES, Applicant has characterized the epitopic specificities, bin assignments, and antigenic site assignments of the inventive antibodies and antigen-binding fragments thereof. In addition to the methods for conducting such characterization, various other techniques are available to the artisan that can be used to carry out such characterization or to otherwise ascertain whether an antibody “interacts with one or more amino acids” within a polypeptide or protein. Exemplary techniques include, for example, a routine cross-blocking assay such as that described Antibodies, Harlow and Lane (Cold Spring Harbor Press, Cold Spring Harb., N.Y.) can be performed. Other methods include alanine scanning mutational analysis, peptide blot analysis (Reineke (2004) Methods Mol Biol 248:443-63), peptide cleavage analysis crystallographic studies and NMR analysis. In addition, methods such as epitope excision, epitope extraction and chemical modification of antigens can be employed (Tomer (2000) Protein Science 9: 487-496). Another method that can be used to identify the amino acids within a polypeptide with which an antibody interacts is hydrogen/deuterium exchange detected by mass spectrometry. In general terms, the hydrogen/deuterium exchange method involves deuterium-labeling the protein of interest, followed by binding the antibody to the deuterium-labeled protein. Next, the protein/antibody complex is transferred to water and exchangeable protons within amino acids that are protected by the antibody complex undergo deuterium-to-hydrogen back-exchange at a slower rate than exchangeable protons within amino acids that are not part of the interface. As a result, amino acids that form part of the protein/antibody interface may retain deuterium and therefore exhibit relatively higher mass compared to amino acids not included in the interface. After dissociation of the antibody, the target protein is subjected to protease cleavage and mass spectrometry analysis, thereby revealing the deuterium-labeled residues that correspond to the specific amino acids with which the antibody interacts. See, e.g., Ehring (1999) Analytical Biochemistry 267 (2):252-259; Engen and Smith (2001) Anal. Chem. 73:256A-265A.

[0157] As the artisan will understand, an epitope can be formed both from contiguous amino acids or noncontiguous amino acids juxtaposed by tertiary folding of a protein. Epitopes formed from contiguous amino acids are typically retained on exposure to denaturing solvents, whereas epitopes formed by tertiary folding are typically lost on treatment with denaturing solvents. An epitope typically includes at least 3, and more usually, at least 5 or 8-10 amino acids in a unique spatial conformation.

[0158] Modification-Assisted Profiling (MAP), also known as Antigen Structure-based Antibody Profiling (ASAP) is a method that categorizes large numbers of monoclonal antibodies (mAbs) directed against the same antigen according to the similarities of the binding profile of each antibody to chemically or enzymatically modified antigen surfaces (U.S. Publ. No. 2004/0101920). Each category may reflect a unique epitope either distinctly different from or partially overlapping with epitope represented by another category. This technology allows rapid filtering of genetically identical antibodies, such that characterization can be focused on genetically distinct antibodies. When applied to hybridoma screening, MAP may facilitate identification of rare hybridoma clones that produce mAbs having the desired characteristics. MAP may be used to sort the antibodies of the invention into groups of antibodies binding different epitopes.

[0159] In certain embodiments, the inventive antibodies and/or antigen-binding fragments thereof interact with an amino acid sequence comprising the amino acid residues that are altered in one or more of the F protein patch variants disclosed, e.g., in the EXAMPLES and which are depicted in, e.g., FIG. 7A and which are designated as RSV F Variants 1, 2, 3, 4, 5, 6, 7, 8, 9, and DG. In certain embodiments, such inventive antibodies and antigen-binding fragments thereof interact with an amino acid sequence comprising the amino acid residues that are altered in RSV F Variant 2. In certain embodiments, the inventive antibodies and/or antigen-binding fragments thereof interact with amino acid residues that extend beyond the region(s) identified above by about 5 to 10 amino acid residues, or by about 10 to 15 amino acid residues, or by about 15 to 20 amino acid residues towards either the amino terminal or the carboxy terminal of the RSV-F protein.

[0160] In certain embodiments, the antibodies of the present invention do not bind to the same epitope on RSV-F protein as palivizumab, motavizumab, MPE8, or AM-14.

[0161] As the artisan understands, one can easily determine whether an antibody binds to the same epitope as, or competes for binding with, a reference anti-RSV-F antibody by using routine methods available in the art. For example, to determine if a test antibody binds to the same epitope as a reference RSV-F antibody of the invention, the reference antibody is allowed to bind to a RSV-F protein or peptide under saturating conditions. Next, the ability of a test antibody to bind to the RSV-F molecule is assessed. If the test antibody is able to bind to RSV-F following saturation binding with the reference anti-RSV-F antibody, it can be concluded that the test antibody binds to a different epitope than the reference anti-RSV-F antibody. On the other hand, if the test antibody is not able to bind to the RSV-F molecule following saturation binding with the reference anti-RSV-F antibody, then the test antibody may bind to the same epitope as the epitope bound by the reference anti-RSV-F antibody of the invention.

[0162] To determine if an antibody competes for binding with a reference anti-RSV-F antibody, the above-described binding methodology is performed in two orientations: In a first orientation, the reference antibody is allowed to bind to a RSV-F molecule under saturating conditions followed by assessment of binding of the test antibody to the RSV-F molecule. In a second orientation, the test antibody is allowed to bind to a RSV-F molecule under saturating conditions followed by assessment of binding of the reference antibody to the RSV-F molecule. If, in both orientations, only the first (saturating) antibody is capable of binding to the RSV-F molecule, then it is concluded that the test antibody and the reference antibody compete for binding to RSV-F. As will be appreciated by a person of ordinary skill in the art, an antibody that competes for binding with a reference antibody may not necessarily bind to the identical epitope as the reference antibody, but may sterically block binding of the reference antibody by binding an overlapping or adjacent epitope.

[0163] Two antibodies bind to the same or overlapping epitope if each competitively inhibits (blocks) binding of the other to the antigen. That is, a 1-, 5-, 10-, 20- or 100-fold excess of one antibody inhibits binding of the other by at least 50% but preferably 75%, 90% or even 99% as measured in a competitive binding assay (see, e.g., Junghans et al., Cancer Res. (1990) 50:1495-1502). Alternatively, two antibodies have the same epitope if essentially all amino acid mutations in the antigen that reduce or eliminate binding of one antibody reduce or eliminate binding of the other. Two antibodies have overlapping epitopes if some amino acid mutations that reduce or eliminate binding of one antibody reduce or eliminate binding of the other.

[0164] Additional routine experimentation (e.g., peptide mutation and binding analyses) can then be carried out to confirm whether the observed lack of binding of the test antibody is in fact due to binding to the same epitope as the reference antibody or if steric blocking (or another phenomenon) is responsible for the lack of observed binding. Experiments of this sort can be performed using ELISA, RIA, surface plasmon resonance, flow cytometry or any other quantitative or qualitative antibody-binding assay available in the art.

### Immunoconjugates

[0165] The invention encompasses a human RSV-F monoclonal antibody conjugated to a therapeutic moiety (“immunoconjugate”), such as an agent that is capable of reducing the severity of primary infection with RSV and/or HMPV, or to ameliorate at least one symptom associated with RSV infection and/or HMPV infection, including coughing, fever, pneumonia, or the severity thereof. Such an agent may be a second different antibody to RSV-F and/or HMPV, or a vaccine. The type of therapeutic moiety that may be conjugated to the anti-RSV-F antibody and/or anti-HMPV antibody and will take into account the condition to be treated and the desired therapeutic effect to be achieved. Alternatively, if the desired therapeutic effect is to treat the sequelae or symptoms associated with RSV and/or HMPV infection, or any other condition resulting from such infection, such as, but not limited to, pneumonia, it may be advantageous to conjugate an agent appropriate to treat the sequelae or symptoms of the condition, or to alleviate any side effects of the antibodies of the invention. Examples of suitable agents for forming immunoconjugates are known in the art, see for example, WO 05/103081.

### Multi-Specific Antibodies

[0166] The antibodies of the present invention may be mono-specific, bi-specific, or multi-specific. Multi-specific antibodies may be specific for different epitopes of one target polypeptide or may contain antigen-binding domains specific for more than one target polypeptide. See, e.g., Tutt et al., 1991, J. Immunol. 147:60-69; Kufer et al., 2004, Trends Biotechnol. 22:238-244. The antibodies of the present invention can be linked to or co-expressed with another functional molecule, e.g., another peptide or protein. For example, an antibody or fragment thereof can be functionally linked {e.g., by chemical coupling, genetic fusion, noncovalent association or otherwise) to one or more other molecular entities, such as another antibody or antibody fragment to produce a bi-specific or a multi-specific antibody with a second binding specificity.

[0167] An exemplary bi-specific antibody format that can be used in the context of the present invention involves the use of a first immunoglobulin (Ig) C_{H}3 domain and a second Ig C_{H}3 domain, wherein the first and second Ig C_{H}3 domains differ from one another by at least one amino acid, and wherein at least one amino acid difference reduces binding of the bi-specific antibody to Protein A as compared to a bi-specific antibody lacking the amino acid difference. In one embodiment, the first Ig C_{H}3 domain binds Protein A and the second Ig C_{H}3 domain contains a mutation that reduces or abolishes Protein A binding such as an H95R modification (by IMGT exon numbering; H435R by EU numbering). The second C_{H}3 may further comprise a Y96F modification (by IMGT; Y436F by EU). Further modifications that may be found within the second C_{H3} include: D16E, L18M, N44S, K52N, V57M, and V82I (by IMGT; D356E, L358M, N384S, K392N, V397M, and V422I by EU) in the case of IgG1 antibodies; N44S, K52N, and V82I (IMGT; N384S, K392N, and V422I by EU) in the case of IgG2 antibodies; and Q15R, N44S, K52N, V57M, R69K, E79Q, and V82I (by IMGT; Q355R, N384S, K392N, V397M, R409K, E419Q, and V422I by EU) in the case of IgG4 antibodies. Variations on the bi-specific antibody format described above are contemplated within the scope of the present invention.

### Therapeutic Administration and Formulations

[0168] The invention provides compositions (including pharmaceutical compositions) comprising the inventive anti-RSV-F and/or HMPV antibodies or antigen-binding fragments thereof or nucleic acid molecules encoding such antibodies or antigen-binding fragments thereof. The administration of compositions in accordance with the invention will be administered with suitable carriers, excipients, and other agents that are incorporated into formulations to provide improved transfer, delivery, tolerance, and the like. A multitude of appropriate formulations can be found in the formulary known to all pharmaceutical chemists: Remington's Pharmaceutical Sciences, Mack Publishing Company, Easton, Pa. These formulations include, for example, powders, pastes, ointments, jellies, waxes, oils, lipids, lipid (cationic or anionic) containing vesicles (such as LIPOFECTIN™), DNA conjugates, anhydrous absorption pastes, oil-in-water and water-in-oil emulsions, emulsions carbowax (polyethylene glycols of various molecular weights), semi-solid gels, and semi-solid mixtures containing carbowax. See also Powell et al. “Compendium of excipients for parenteral formulations” PDA (1998) J Pharm Sci Technol 52:238-31 1.

[0169] The dose of each of the antibodies of the invention may vary depending upon the age and the size of a subject to be administered, target disease, conditions, route of administration, and the like. When the antibodies of the present invention are used for treating a RSV infection and/or HMPV infection in a patient, or for treating one or more symptoms associated with a RSV infection and/or HMPV infection, such as the cough or pneumonia associated with a RSV infection and/or HMPV in a patient, or for lessening the severity of the disease, it is advantageous to administer each of the antibodies of the present invention intravenously or subcutaneously normally at a single dose of about 0.01 to about 30 mg/kg body weight, more preferably about 0.1 to about 20 mg/kg body weight, or about 0.1 to about 15 mg/kg body weight, or about 0.02 to about 7 mg/kg body weight, about 0.03 to about 5 mg/kg body weight, or about 0.05 to about 3 mg/kg body weight, or about 1 mg/kg body weight, or about 3.0 mg/kg body weight, or about 10 mg/kg body weight, or about 20 mg/kg body weight. Multiple doses may be administered as necessary. Depending on the severity of the condition, the frequency and the duration of the treatment can be adjusted. In certain embodiments, the antibodies or antigen-binding fragments thereof of the invention can be administered as an initial dose of at least about 0.1 mg to about 800 mg, about 1 mg to about 600 mg, about 5 mg to about 300 mg, or about 10 mg to about 150 mg, to about 100 mg, or to about 50 mg. In certain embodiments, the initial dose may be followed by administration of a second or a plurality of subsequent doses of the antibodies or antigen-binding fragments thereof in an amount that can be approximately the same or less than that of the initial dose, wherein the subsequent doses are separated by at least 1 day to 3 days; at least one week, at least 2 weeks; at least 3 weeks; at least 4 weeks; at least 5 weeks; at least 6 weeks; at least 7 weeks; at least 8 weeks; at least 9 weeks; at least 10 weeks; at least 12 weeks; or at least 14 weeks.

[0170] Various delivery systems are known and can be used to administer the pharmaceutical composition of the invention, e.g., encapsulation in liposomes, microparticles, microcapsules, recombinant cells capable of expressing the mutant viruses, receptor mediated endocytosis (see, e.g., Wu et al. (1987) J. Biol. Chem. 262:4429-4432). Methods of introduction include, but are not limited to, intradermal, transdermal, intramuscular, intraperitoneal, intravenous, subcutaneous, intranasal, epidural and oral routes. The composition may be administered by any convenient route, for example by infusion or bolus injection, by absorption through epithelial or mucocutaneous linings {e.g., oral mucosa, nasal mucosa, rectal and intestinal mucosa, etc.) and may be administered together with other biologically active agents. Administration can be systemic or local. It may be delivered as an aerosolized formulation (See U.S. Publ. No. 2011/031 1515 and U.S. Publ. No. 2012/0128669). The delivery of agents useful for treating respiratory diseases by inhalation is becoming more widely accepted (See A. J. Bitonti and J. A. Dumont, (2006), Adv. Drug Deliv. Rev, 58:1 106-1118). In addition to being effective at treating local pulmonary disease, such a delivery mechanism may also be useful for systemic delivery of antibodies (See Maillet et al. (2008), Pharmaceutical Research, Vol. 25, No. 6, 2008).

[0171] The pharmaceutical composition can be also delivered in a vesicle, in particular a liposome (see, for example, Langer (1990) Science 249:1527-1533).

[0172] In certain situations, the pharmaceutical composition can be delivered in a controlled release system. In one embodiment, a pump may be used. In another embodiment, polymeric materials can be used. In yet another embodiment, a controlled release system can be placed in proximity of the composition's target, thus requiring only a fraction of the systemic dose.

[0173] The injectable preparations may include dosage forms for intravenous, subcutaneous, intracutaneous and intramuscular injections, drip infusions, etc. These injectable preparations may be prepared by methods publicly known. For example, the injectable preparations may be prepared, e.g., by dissolving, suspending or emulsifying the antibody or its salt described above in a sterile aqueous medium or an oily medium conventionally used for injections. As the aqueous medium for injections, there are, for example, physiological saline, an isotonic solution containing glucose and other auxiliary agents, etc., which may be used in combination with an appropriate solubilizing agent such as an alcohol (e.g., ethanol), a polyalcohol (e.g., propylene glycol, polyethylene glycol), a nonionic surfactant [e.g., polysorbate 80, HCO-50 (polyoxyethylene (50 mol) adduct of hydrogenated castor oil)], etc. As the oily medium, there are employed, e.g., sesame oil, soybean oil, etc., which may be used in combination with a solubilizing agent such as benzyl benzoate, benzyl alcohol, etc. The injection thus prepared is preferably filled in an appropriate ampoule.

[0174] A pharmaceutical composition of the present invention can be delivered subcutaneously or intravenously with a standard needle and syringe. In addition, with respect to subcutaneous delivery, a pen delivery device readily has applications in delivering a pharmaceutical composition of the present invention. Such a pen delivery device can be reusable or disposable. A reusable pen delivery device generally utilizes a replaceable cartridge that contains a pharmaceutical composition. Once all of the pharmaceutical composition within the cartridge has been administered and the cartridge is empty, the empty cartridge can readily be discarded and replaced with a new cartridge that contains the pharmaceutical composition. The pen delivery device can then be reused. In a disposable pen delivery device, there is no replaceable cartridge. Rather, the disposable pen delivery device comes prefilled with the pharmaceutical composition held in a reservoir within the device. Once the reservoir is emptied of the pharmaceutical composition, the entire device is discarded.

[0175] Numerous reusable pen and autoinjector delivery devices have applications in the subcutaneous delivery of a pharmaceutical composition of the present invention. Examples include, but certainly are not limited to AUTOPEN™ (Owen Mumford, Inc., Woodstock, UK), DISETRONIC™ pen (Disetronic Medical Systems, Burghdorf, Switzerland), HUMALOG MIX 75/25™ pen, HUIIVIALOG™ pen, HUMALIN 70/30™ pen (Eli Lilly and Co., Indianapolis, Ind.), NOVOPEN™ I, II and III (Novo Nordisk, Copenhagen, Denmark), NOVOPEN JUNIOR™ (Novo Nordisk, Copenhagen, Denmark), BD™ pen (Becton Dickinson, Franklin Lakes, N.J.), OPTIPEN™, OPTIPEN PRO™ OPTIPEN STARLET™, and OPTICLIK™ (Sanofi-Aventis, Frankfurt, Germany), to name only a few. Examples of disposable pen delivery devices having applications in subcutaneous delivery of a pharmaceutical composition of the present invention include, but certainly are not limited to the SOLOSTAR™ pen (Sanofi-Aventis), the FLEXPEN™ (Novo Nordisk), and the KWIKPEN™ (Eli Lilly), the SURECLICK™ Autoinjector (Amgen, Thousand Oaks, Calif.), the PENLET™ (Haselmeier, Stuttgart, Germany), the EPIPEN (Dey, L.P.) and the HUMIRA™ Pen (Abbott Labs, Abbott Park, Ill.), to name only a few.

[0176] Advantageously, the pharmaceutical compositions for oral or parenteral use described above are prepared into dosage forms in a unit dose suited to fit a dose of the active ingredients. Such dosage forms in a unit dose include, for example, tablets, pills, capsules, injections (ampoules), suppositories, etc. The amount of the aforesaid antibody contained is generally about 5 to about 500 mg per dosage form in a unit dose; especially in the form of injection, it is preferred that the aforesaid antibody is contained in about 5 to about 100 mg and in about 10 to about 250 mg for the other dosage forms.

### Administration Regimens

[0177] According to certain embodiments, multiple doses of an antibody to RSV-F and/or HMPV, or a pharmaceutical composition comprising or encoding for these antibodies, may be administered to a subject over a defined time course. The methods according to this aspect of the invention comprise sequentially administering to a subject multiple doses of an antibody to RSV-F and/or HMPV, or sequentially administering to a subject multiple doses of a pharmaceutical composition comprising or encoding for an antibody of the invention or antigen binding fragment thereof. In one embodiment, nucleic acid sequences encoding for a heavy chain or light chain of an antibody of the invention (or antigen binding fragment thereof) are administered separately such that an antibody or antigen binding fragment thereof is expressed in the subject. In another embodiment, nucleic acid sequences encoding for a heavy chain and light chain of an antibody of the invention (or antigen binding fragment thereof) are administered together. As used herein, “sequentially administering” means that each dose of antibody to RSV-F and/or HMPV, or the pharmaceutical composition, is administered to the subject at a different point in time, e.g., on different days separated by a predetermined interval (e.g., hours, days, weeks or months). The present invention includes methods which comprise sequentially administering to the patient a single initial dose of an antibody to RSV-F and/or HMPV, or a composition comprising or encoding for the antibodies, followed by one or more secondary doses of the antibody to RSV-F and/or HMPV, or the composition, and optionally followed by one or more tertiary doses of the antibody to RSV-F and/or HMPV, or the composition.

[0178] The terms “initial dose,” “secondary doses,” and “tertiary doses,” refer to the temporal sequence of administration of the antibody to RSV-F and/or HMPV or the compositions of the invention. Thus, the “initial dose” is the dose which is administered at the beginning of the treatment regimen (also referred to as the “baseline dose”); the “secondary doses” are the doses which are administered after the initial dose; and the “tertiary doses” are the doses which are administered after the secondary doses. The initial, secondary, and tertiary doses may all contain the same amount of antibody to RSV-F and/or HMPV, or nucleic acid sequence encoding at least one chain of such antibody (or antigen binding fragment thereof), but generally may differ from one another in terms of frequency of administration. In certain embodiments, however, the amount of antibody to RSV-F and/or HMPV, or nucleic acid sequence encoding at least one chain of such antibody (or antigen binding fragment thereof), contained in the initial, secondary and/or tertiary doses vary from one another (e.g., adjusted up or down as appropriate) during the course of treatment. In certain embodiments, two or more (e.g., 2, 3, 4, or 5) doses are administered at the beginning of the treatment regimen as “loading doses” followed by subsequent doses that are administered on a less frequent basis (e.g., “maintenance doses”).

[0179] In one exemplary embodiment of the present invention, each secondary and/or tertiary dose is administered 1 to 26 (e.g., 1, 1½, 2, 2½, 3, 3½, 4, 4½, 5, 5½, 6, 6½, 7, 7½, 8, 8½, 9, 9½, 10, 10½, 11, 11½, 12, 12½, 13, 13½, 14, 14½, 15, 15½, 16, 16½, 17, 17½, 18, 18½, 19, 19½, 20, 20½, 21, 21½, 22, 22½, 23, 23½, 24, 24½, 25, 25½, 26, 26½, or more) weeks after the immediately preceding dose. The phrase “the immediately preceding dose,” as used herein, means, in a sequence of multiple administrations, the dose of antibody to RSV-F and/or HMPV, or nucleic acid sequence encoding at least one chain of such antibody (or antigen binding fragment thereof), which is administered to a patient prior to the administration of the very next dose in the sequence with no intervening doses.

[0180] The methods according to this aspect of the invention may comprise administering to a patient any number of secondary and/or tertiary doses of an antibody to RSV-F and/or HMPV or a nucleic acid sequence(s) encoding at least one chain of such antibody (or antigen binding fragment thereof). For example, in certain embodiments, only a single secondary dose is administered to the patient. In other embodiments, two or more (e.g., 2, 3, 4, 5, 6, 7, 8, or more) secondary doses are administered to the patient. Likewise, in certain embodiments, only a single tertiary dose is administered to the patient. In other embodiments, two or more (e.g., 2, 3, 4, 5, 6, 7, 8, or more) tertiary doses are administered to the patient.

[0181] In embodiments involving multiple secondary doses, each secondary dose may be administered at the same frequency as the other secondary doses. For example, each secondary dose may be administered to the patient 1 to 2 weeks after the immediately preceding dose. Similarly, in embodiments involving multiple tertiary doses, each tertiary dose may be administered at the same frequency as the other tertiary doses. For example, each tertiary dose may be administered to the patient 2 to 4 weeks after the immediately preceding dose. Alternatively, the frequency at which the secondary and/or tertiary doses are administered to a patient can vary over the course of the treatment regimen. The frequency of administration may also be adjusted during the course of treatment by a physician depending on the needs of the individual patient following clinical examination.

[0182] Accordingly, in certain embodiments are provided pharmaceutical compositions comprising: one or more of the inventive antibodies or antigen-binding fragments thereof disclosed herein and throughout and a pharmaceutically acceptable carrier and/or one or more excipients. In certain other embodiments are provided pharmaceutical compositions comprising: one or more nucleic acid sequences encoding one or more inventive antibodies or antigen-binding fragments thereof, e.g., a nucleic acid sequence(s) encoding one or more chains of an antibody or antigen-binding fragment thereof as disclosed herein; or one or more the expression vectors harboring such nucleic acid sequences; and a pharmaceutically acceptable carrier and/or one or more excipients.

### Therapeutic Uses of the Antibodies and Pharmaceutical Compositions

[0183] Due to their binding to and interaction with the RSV fusion protein (RSV-F), it is believed that the inventive antibodies and antigen-binding fragments thereof, and pharmaceutical compositions encoding or comprising such antibodies, are useful—without wishing to be bound to any theory—for preventing fusion of the virus with the host cell membrane, for preventing cell to cell virus spread, and for inhibition of syncytia formation. Additionally, as Applicant has demonstrated herein that, surprisingly, a subset of the inventive anti-RSV antibodies and antigen-binding fragment thereof display cross-neutralizing potency against HMPV, the inventive antibodies and antigen-binding fragments thereof and pharmaceutical compositions are advantageous for preventing an infection of a subject with RSV and/or HMPV when administered prophylactically. Alternatively, the antibodies and pharmaceutical compositions of the present invention may be useful for ameliorating at least one symptom associated with the infection, such as coughing, fever, pneumonia, or for lessening the severity, duration, and/or frequency of the infection. The antibodies and pharmaceutical compositions of the invention are also contemplated for prophylactic use in patients at risk for developing or acquiring an RSV infection and/or HMPV infection. These patients include pre-term infants, full term infants born during RSV season (late fall to early spring), the elderly (for example, in anyone 65 years of age or older) and/or HMPV season, or patients immunocompromised due to illness or treatment with immunosuppressive therapeutics, or patients who may have an underlying medical condition that predisposes them to an RSV infection (for example, cystic fibrosis patients, patients with congestive heart failure or other cardiac conditions, patients with airway impairment, patients with COPD) and/or HMPV infection. It is contemplated that the antibodies and pharmaceutical compositions of the invention may be used alone, or in conjunction with a second agent, or third agent for treating RSV infection and/or HMPV infection, or for alleviating at least one symptom or complication associated with the RSV infection and/or HMPV infection, such as the fever, coughing, bronchiolitis, or pneumonia associated with, or resulting from such an infection. The second or third agents may be delivered concurrently with the antibodies (or pharmaceutical compositions) of the invention, or they may be administered separately, either before or after the antibodies (or pharmaceutical compositions) of the invention. The second or third agent may be an anti-viral such as ribavirin, an NSAID or other agents to reduce fever or pain, another second but different antibody that specifically binds RSV-F, an agent (e.g., an antibody) that binds to another RSV antigen, such as RSV-G, a vaccine against RSV, an siRNA specific for an RSV antigen.

[0184] In yet a further embodiment of the invention the present antibodies (or antigen binding fragments thereof) or nucleic acid sequence encoding at least one chain of such antibody (or antigen binding fragment thereof), are used for the preparation of a pharmaceutical composition for treating patients suffering from a RSV infection and/or HMPV infection. In yet another embodiment of the invention the present antibodies (or antigen-binding fragments thereof), or nucleic acid sequence encoding at least one chain of such antibody (or antigen binding fragment thereof), are used for the preparation of a pharmaceutical composition for reducing the severity of a primary infection with RSV and/or HMPV, or for reducing the duration of the infection, or for reducing at least one symptom associated with the RSV infection and/or the HMPV infection. In a further embodiment of the invention, the present antibodies (or pharmaceutical compositions comprising or encoding such antibodies) are used as adjunct therapy with any other agent useful for treating an RSV infection and/or and HMPV infection, including an antiviral, a toxoid, a vaccine, a second RSV-F antibody, or any other antibody specific for an RSV antigen, including an RSV-G antibody, or any other palliative therapy known to those skilled in the art.

[0185] Accordingly, in certain embodiments are provided methods of treating or preventing a Respiratory Syncytial Virus (RSV) infection, or at least one symptom associated with RSV infection, comprising administering to a patient in need thereof or suspected of being in need thereof one or more of the inventive antibodies or antigen-binding fragments thereof disclosed herein and throughout (or pharmaceutical compositions of the invention), such as, e.g., one or more of the anti-RSV antibodies disclosed in Table 6 or nucleic acid sequence encoding at least one chain of such antibody or antigen binding fragment thereof, such that the RSV infection is treated or prevented, or the at least on symptom associated with RSV infection is treated, alleviated, or reduced in severity.

[0186] In certain other embodiments are provided methods of treating or preventing a Respiratory Syncytial Virus (RSV) infection, or at least one symptom associated with RSV infection, comprising administering to a patient in need thereof or suspected of being in need thereof a nucleic acid sequence encoding at least one of a light chain or heavy chain of one or more of the inventive antibodies or antigen-binding fragments thereof, such as the nucleic acid sequences disclosed in Table 6 and compliments thereof, such that the RSV infection is treated or prevented, or the at least on symptom associated with RSV infection is treated, alleviated, or reduced in severity. In one embodiment, a pharmaceutical composition of the invention comprises a nucleic acid sequence encoding an antibody light chain or antigen-binding fragment thereof and a nucleic acid sequence encoding an antibody heavy chain or antigen-binding fragment thereof. In another embodiment, a first pharmaceutical composition of the invention comprises a nucleic acid sequence encoding an antibody light chain (or antigen binding fragment thereof) and a second pharmaceutical composition comprises a nucleic acid sequence encoding an antibody heavy chain (or antigen binding fragment thereof) such that upon coadministration of the first and second pharmaceutical compositions to the subject, an antibody of the invention or antigen binding fragment thereof is expressed in the subject.

[0187] In additional embodiments are provided methods of treating or preventing a Respiratory Syncytial Virus (RSV) infection, or at least one symptom associated with RSV infection, comprising administering to a patient in need thereof or suspected of being in need thereof a host cell harboring a nucleic acid sequence or an expression vector comprising such a nucleic acid sequence, wherein such nucleic acid sequences is selected from the group consisting of sequences disclosed in Table 6 and compliments thereof, such that the RSV infection is treated or prevented, or the at least on symptom associated with RSV infection is treated, alleviated, or reduced in severity.

[0188] In additional embodiments are provided methods of treating or preventing a Respiratory Syncytial Virus (RSV) infection, or at least one symptom associated with RSV infection, comprising administering to a patient in need thereof or suspected of being in need thereof a pharmaceutical composition comprising either: one or more of the inventive antibodies or antigen-binding fragments thereof as disclosed in Table 6; one or more nucleic acid sequences encoding at least one of a light chain or a heavy chain of an antibody of the invention or an antigen binding fragment thereof or an expression vectors comprising such a nucleic acid sequence(s), wherein such nucleic acid sequences are selected from the group consisting of sequences disclosed in Table 6 and compliments thereof; one or more host cells harboring one or more nucleic acid sequences or an expression vectors comprising such one or more nucleic acid sequences, wherein such nucleic acid sequences are selected from the group consisting of sequences disclosed in Table 6 and compliments thereof; and a pharmaceutically acceptable carrier and/or one or more excipients, such that the RSV infection is treated or prevented, or the at least on symptom associated with RSV infection is treated, alleviated, or reduced in severity.

[0189] In certain embodiments are provided methods of treating or preventing either a Respiratory Syncytial Virus (RSV) infection or a human metapneumovirus (HMPV) infection, or at least one symptom associated with said RSV infection or said HMPV infection, comprising administering to a patient in need thereof or suspected of being in need thereof one or more of the inventive antibodies or antigen-binding fragments thereof disclosed herein and throughout, such as, e.g., one or more of the anti-RSV antibodies disclosed in Table 6, or pharmaceutical compositions comprising or encoding such antibodies or antigen-binding fragments thereof, e.g., one or more nucleic acid molecules encoding such antibodies, such that the RSV infection is treated or prevented, or the at least on symptom associated with RSV infection is treated, alleviated, or reduced in severity. In certain embodiments, the one or more antibodies or antigen-binding fragments thereof is selected from the group consisting of the antibodies designated as Antibody Number 4, 11, and 62 as disclosed in Table 6 or one or more nucleic acid molecules encoding such antibodies.

[0190] In certain other embodiments are provided methods of treating or preventing either a Respiratory Syncytial Virus (RSV) infection and/or a human metapneumovirus (HMPV) infection, or at least one symptom associated with said RSV infection and/or said HMPV infection, comprising administering to a patient in need thereof or suspected of being in need thereof a nucleic acid sequence encoding one or more of the inventive antibodies or antigen-binding fragments thereof, e.g., encoding heavy or light chains of the antibodies, such nucleic acid sequences disclosed in Table 6 and compliments thereof, such that the RSV infection and/or the HMPV infection is treated or prevented, or the at least on symptom associated with RSV and/or HMPV infection is treated, alleviated, or reduced in severity. In certain embodiments, the one or more antibodies or antigen-binding fragments thereof, e.g., antibody light or heavy chains, is selected from the group consisting of the antibodies designated as Antibody Number Antibody Number 4, 11, and 62 as disclosed in Table 6. In one embodiment, a pharmaceutical composition of the invention comprises a nucleic acid sequence encoding an antibody light chain or antigen-binding fragment thereof and a nucleic acid sequence encoding an antibody heavy chain or antigen binding fragment thereof. In another embodiment, a first pharmaceutical composition of the invention comprises a nucleic acid sequence encoding an antibody light chain (or antigen binding fragment thereof) and a second pharmaceutical composition comprises a nucleic acid sequence encoding an antibody heavy chain (or antigen binding fragment thereof) such that upon coadministration of the first and second pharmaceutical compositions to the subject, an antibody of the invention or antigen binding fragment thereof is expressed in the subject.

[0191] In additional embodiments are provided methods of treating or preventing either a Respiratory Syncytial Virus (RSV) infection or a human metapneumovirus (HMPV) infection, or at least one symptom associated with said RSV infection or said HMPV infection, comprising administering to a patient in need thereof or suspected of being in need thereof a host cell harboring a nucleic acid sequence or an expression vector comprising such a nucleic acid sequence, wherein such nucleic acid sequences is selected from the group consisting of sequences disclosed in Table 6 and compliments thereof, such that the RSV infection is treated or prevented, or the at least on symptom associated with RSV infection is treated, alleviated, or reduced in severity. In certain embodiments, the one or more antibodies or antigen-binding fragments thereof of is selected from the group consisting of the antibodies designated as Antibody Number Antibody Number 4, 11, and 62 as disclosed in Table 6.

[0192] In additional embodiments are provided methods of treating or preventing either a Respiratory Syncytial Virus (RSV) infection or a human metapneumovirus (HMPV) infection, or at least one symptom associated with said RSV infection or said HMPV infection, comprising administering to a patient in need thereof or suspected of being in need thereof a pharmaceutical composition comprising either: one or more of the inventive antibodies or antigen-binding fragments thereof as disclosed in Table 6; one or more nucleic acid sequences or an expression vectors comprising such a nucleic acid sequence, wherein such nucleic acid sequences are selected from the group consisting of sequences disclosed in Table 6 and compliments thereof; one or more host cells harboring one or more nucleic acid sequences or an expression vectors comprising such one or more nucleic acid sequences, wherein such nucleic acid sequences are selected from the group consisting of sequences disclosed in Table 6 and compliments thereof; and a pharmaceutically acceptable carrier and/or one or more excipients, such that the RSV infection is treated or prevented, or the at least on symptom associated with RSV infection is treated, alleviated, or reduced in severity. In certain embodiments, the one or more antibodies or antigen-binding fragments thereof of is selected from the group consisting of the antibodies designated as Antibody Number Antibody Number 4, 11, and 62 as disclosed in Table 6.

### Combination Therapies

[0193] As noted above, according to certain embodiments, the disclosed methods comprise administering to the subject one or more additional therapeutic agents in combination with an antibody to RSV-F and/or HMPV or a pharmaceutical composition of the invention. As used herein, the expression “in combination with” means that the additional therapeutic agents are administered before, after, or concurrent with the antibody or pharmaceutical composition of the invention. The term “in combination with” also includes sequential or concomitant administration of the anti-RSV-F antibody or pharmaceutical composition and a second therapeutic agent.

[0194] For example, when administered “before” the pharmaceutical composition comprising or encoding the anti-RSV-F and/or HMPV antibody, the additional therapeutic agent may be administered about 72 hours, about 60 hours, about 48 hours, about 36 hours, about 24 hours, about 12 hours, about 10 hours, about 8 hours, about 6 hours, about 4 hours, about 2 hours, about 1 hour, about 30 minutes, about 15 minutes or about 10 minutes prior to the administration of the pharmaceutical composition comprising or encoding the anti-RSV-F and/or HMPV antibody. When administered “after” the pharmaceutical composition comprising or encoding the anti-RSV-F and/or HMPV antibody, the additional therapeutic agent may be administered about 10 minutes, about 15 minutes, about 30 minutes, about 1 hour, about 2 hours, about 4 hours, about 6 hours, about 8 hours, about 10 hours, about 12 hours, about 24 hours, about 36 hours, about 48 hours, about 60 hours or about 72 hours after the administration of the pharmaceutical composition comprising or encoding the anti-RSV-F and/or HMPV antibodies. Administration “concurrent” or with the pharmaceutical composition comprising or encoding the anti-RSV-F and/or HMPV antibody means that the additional therapeutic agent is administered to the subject in a separate dosage form within less than 5 minutes (before, after, or at the same time) of administration of the pharmaceutical composition comprising or encoding the anti-RSV-F and/or HMPV antibody, or administered to the subject as a single combined dosage formulation comprising both the additional therapeutic agent and the anti-RSV-F antibody or pharmaceutical composition.

[0195] Combination therapies may include an anti-RSV-F and/or HMPV antibody or pharmaceutical composition of the invention and any additional therapeutic agent that may be advantageously combined with an antibody of the invention, or with a biologically active fragment of an antibody of the invention.

[0196] For example, a second or third therapeutic agent may be employed to aid in reducing the viral load in the lungs, such as an antiviral, for example, ribavirin. The antibodies or pharmaceutical compositions of the invention may also be used in conjunction with other therapies, as noted above, including a toxoid, a vaccine specific for RSV and/or HMPV, a second antibody specific for RSV-F, or an antibody specific for another RSV antigen, such as RSV-G.

### Diagnostic Uses of the Antibodies

[0197] The inventive anti-RSV and/or HMPV antibodies and antigen-binding fragments thereof may also be used to detect and/or measure RSV and/or HMPV in a sample, e.g., for diagnostic purposes. It is envisioned that confirmation of an infection thought to be caused by RSV and/or HMPV may be made by measuring the presence of the virus through use of any one or more of the antibodies of the invention. Exemplary diagnostic assays for RSV and/or HMPV may comprise, e.g., contacting a sample, obtained from a patient, with an anti-RSV-F and/or HMPV antibody of the invention, wherein the anti-RSV-F and/or HMPV antibody is labeled with a detectable label or reporter molecule or used as a capture ligand to selectively isolate the virus containing the F protein from patient samples. Alternatively, an unlabeled anti-RSV-F and/or HMPV antibody can be used in diagnostic applications in combination with a secondary antibody which is itself detectably labeled. The detectable label or reporter molecule can be a radioisotope, such as ³H, ¹⁴C, ³²P ³⁵S, or ¹²⁵I; a fluorescent or chemiluminescent moiety such as fluorescein isothiocyanate, or rhodamine; or an enzyme such as alkaline phosphatase, 0-galactosidase, horseradish peroxidase, or luciferase. Specific exemplary assays that can be used to detect or measure RSV containing the F protein and/or HMPV in a sample include enzyme-linked immunosorbent assay (ELISA), radioimmunoassay (RIA), and fluorescence-activated cell sorting (FACS).

[0198] Samples that can be used in RSV and/or HMPV diagnostic assays according to the present invention include any tissue or fluid sample obtainable from a patient, which contains detectable quantities of RSV-F protein and/or HMPV, or fragments thereof, under normal or pathological conditions. Generally, levels of RSV-F and/or HMPV in a particular sample obtained from a healthy patient (e.g., a patient not afflicted with a disease or condition associated with the presence of RSV-F and/or HMPV) will be measured to initially establish a baseline, or standard, level of the F protein from RSV and/or HMPV. This baseline level of RSV-F and/or HMPV can then be compared against the levels of RSV-F and/or HMPV measured in samples obtained from individuals suspected of having an RSV and/or HMPV infection, or symptoms associated with such infection.

### EXAMPLES

[0199] Applicant has comprehensively profiled the human antibody response to RSV fusion protein (F) by isolating and characterizing 123 RSV F-specific monoclonal antibodies from the memory B cells of a healthy adult donor, and used these antibodies to comprehensively map the antigenic topology of RSV F. The antibody response to RSV F was determined to be comprised of a broad diversity of clones that target several antigenic sites. Nearly half of the most potent antibodies target a previously undefined site of vulnerability near the apex of the prefusion conformation of RSV F (preF), providing strong support for the development of RSV antibodies that target this region, as well as vaccine candidates that preserve the membrane-distal hemisphere of the preF protein. Additionally, this class of antibodies displayed convergent sequence features, thus providing a future means to rapidly detect these types of antibodies in human samples. Many of the antibodies that bound preF-specific surfaces from this donor were over 100 times more potent than palivizumab and several cross-neutralized human metapneumovirus (HMPV). Taken together, the results have implications for the design and evaluation of RSV vaccine and antibody-based therapeutic candidates, and offer new options for passive prophylaxis.

Large-Scale Isolation of RSV F-Specific Monoclonal Antibodies from Healthy Adult Human Donors

[0200] In order to comprehensively profile the human antibody response to RSV F, Applicant isolated and characterized 123 monoclonal antibodies from the memory B cells of a healthy adult donor (“donor 076”). Although this donors did not have a documented history of RSV infection, healthy adults are expected to have had multiple RSV infections throughout life (26).

[0201] The magnitude of the memory B cell response in this donor to RSV F was assessed by staining peripheral B cells with a mixture of fluorescently labeled pre- and postfusion RSV F sorting probes (FIG. 6A through 6B) (11, 15). Both proteins were dual-labeled in order to eliminate background due to non-specific fluorochrome binding (27). Flow cytometric analysis revealed that 0.04-0.18% of class-switched (IgG⁺ and IgA⁺) peripheral B cells were specific for RSV F (FIG. 1A and Figure B), which is significantly lower than the percentage of RSV F-specific cells observed after experimental RSV infection and suggests that this donor was probably not recently exposed to RSV (28). Notably, index sorting showed that 17-38% of circulating RSV F-specific B cells express IgA, indicating that IgA memory B cells to RSV F are present in peripheral blood (FIG. 1B).

[0202] Approximately 200 RSV F-specific B cells were single-cell sorted from the donor sample, and antibody variable heavy (VH) and variable light (VL) chain genes were rescued by single-cell PCR (29). One hundred twenty-three (123) cognate heavy and light chain pairs were subsequently cloned and expressed as full-length IgGs in an engineered strain of Saccharomyces cerevisiae for further characterization (30). Preliminary binding studies showed that approximately 80% of antibodies cloned from RSV F glycoprotein (F)-specific B cells bound to recombinant RSV F proteins.

### Sequence Analysis of RSV F-Specific Antibody Repertoires

[0203] Sequence analysis of the isolated monoclonal antibodies revealed that the RSV-F specific repertoire was highly diverse, containing over 70 unique lineages (FIG. 1C and Table 2). This result is in stark contrast to the relatively restricted repertoires observed in HIV-infected patients (31), or in healthy donors after influenza vaccination (32). Compared to non-RSV-reactive antibodies (33), the RSV F-specific repertoires were skewed, generally, toward certain VH germline genes (VH1-18, VH1-2, VH1-69, VH3-21, VH3-30, VH4-304, and VH5-51) (FIG. 1D and Table 2) and longer heavy chain third complementarity-determining region (CDRH3) lengths (generally, approximately 14-18 amino acids in length; FIG. 1E and Table 2). Interestingly, a bias toward VH1-69 has also been observed in anti-HIV-1, anti-influenza, and anti-HCV repertoires (34-36), and recent studies have shown that there is a significant increase in the relative usage of VH1-18, VH1-2, and VH1-69 during acute dengue infection (37). Hence, it appears that these particular germline gene segments may have inherent properties that facilitate recognition of viral envelope proteins.

[0204] The average level of somatic hypermutation (SHM) ranged generally between 16 and 30 nucleotide substitutions per VH gene (excluding CDRH3) (FIG. 1F and Table 2), which is comparable to the average level of SHM observed in anti-influenza antibody repertoires (32, 38) and consistent with the recurrent nature of RSV infection (26). Interestingly, several antibodies contained 60 or greater VH gene nucleotide substitutions, suggesting that multiple rounds of RSV infection can result in antibodies with very high levels of somatic hypermutation (SHM).

A Large Proportion of Antibodies Bind Exclusively to preF

[0205] We next measured the apparent binding affinities of the IgGs to furin-cleaved RSV F ectodomains stabilized in the prefusion (DS-Cav1) or postfusion (F ΔFP) conformation using biolayer interferometry (11, 15). A relatively large proportion of the antibodies (36-67%) bound exclusively to preF (FIG. 2A and Figure B; Table 3). The vast majority of remaining antibodies bound to both pre- and postF, with only 5-7% of antibodies showing exclusive postF specificity (FIG. 2A and Figure B; Table 3). The low prevalence of postF-specific antibodies in these donor repertoires is consistent with the observation that less than 10% of anti-RSV F serum-binding activity specifically targets postF (8). Interestingly, however, the majority of cross-reactive antibodies bound with higher apparent affinity to postF (FIG. 2A; Table 3), suggesting that these antibodies were probably elicited by and/or affinity matured against postF in vivo. Hence, the significantly higher proportion of preF- versus postF-specific antibodies is likely due to the higher immunogenicity of the unique surfaces on preF compared to postF, rather than an increased abundance of preF in vivo. Finally, as expected based on the relatively high degree of sequence conservation between RSV subtypes, most of the antibodies showed binding reactivity to F proteins derived from both subtypes A and B (FIG. 2C; Table 3).

[0206] Since certain antiviral antibody specificities have been associated with poly- and autoreactivity (39-41), we also tested the RSV antibodies for polyreactivity using a previously described high-throughput assay that correlates with down-stream behaviors such as serum clearance (42, 43). One hundred and seventy-seven clinical antibodies, as well as several broadly neutralizing HIV antibodies, were also included for comparison. Interestingly, in contrast to many previously described HIV broadly neutralizing antibodies, the vast majority of RSV F-specific antibodies lacked significant polyreactivity in this assay (FIG. 2D).

### RSV F-Specific Antibodies Target Six Major Antigenic Sites

[0207] To map the antigenic specificities of the RSV F-specific antibodies, Applicant first performed competitive binding experiments using a previously described yeast-based assay (44). Antibodies were initially tested for competition with D25, AM14 and MPE8—three previously described preF-specific antibodies (10, 17, 21)—and motavizumab, an affinity-matured variant of palivizumab that binds to both pre- and postF (10, 11, 45). Non-competing antibodies were then tested for competition with a site IV-directed mAb (101F) (46), a site I-directed antibody (Site I Ab), and two high affinity antibodies (High Affinity Ab I and High Affinity Ab 2, respectively) that did not strongly compete with each other or any of the control antibodies. Each antibody was assigned a bin based on the results of this competition assay (see, e.g., Table 4).

[0208] In order to confirm and increase the resolution of our epitope assignments, the binding of each antibody to a panel of preF variants was measured using a luminex-based assay. Each variant contained 2-4 mutations clustered together to form a patch on the surface of preF. A total of nine patches that uniformly covered the surface of preF were generated (FIG. 7A through FIG. 7C). Deglycosylated preF was also included to identify antibodies targeting glycan-dependent epitopes. Binding of each antibody to the 10 preF variants was compared to that of wild-type preF and used to assign a patch (see, e.g., Table 4). Previously characterized antibodies D25, AM14 and motavizumab were used to validate the assay (see, e.g., FIG. 7C and Table 4). The combined bin and patch data were then used to assign each antibody to a single antigenic site (FIG. 3A through FIG. 3G), which were defined based on previously determined structures, resistance mutations, and secondary structure elements of the F protein. Overall, these data show that the large majority of isolated antibodies target six dominant antigenic sites on prefusion RSV F (ø, I, II, III, IV, and V). Interestingly, only a small proportion of the isolated antibodies had binding profiles similar to that of AM14, suggesting that antibodies targeting this quaternary epitope are not commonly elicited during natural infection. None of the antibodies were sensitive to deglycosylation of F, demonstrating that glycan-dependent antibodies are also rarely elicited by natural RSV infection.

[0209] Analysis of the preF- and postF-binding activities of the antibodies targeting each antigenic site (see, e.g., FIG. 3C through FIG. 3G; Table 4) revealed that three sites are primarily found on preF (ø, III, and V). Antibodies targeting site ø and site III have been previously described (10, 17), and these sites are located on the top and side of the preF spike, respectively. Approximately 4% of the antibodies from this donor recognized site ø and approximately 6% recognized site III. A relatively large proportion of antibodies from this donor (approximately 20%) recognized the third preF-specific site, which has not been previously described and therefore has been designated herein as region site V (See, e.g., FIG. 3C through FIG. 3G; Table 4). The majority of site V antibodies competed with D25, MPE8 and motavizumab, which was unexpected given the distance between the epitopes recognized by these three antibodies. The patch mutant analysis revealed that these antibodies interact with the α3 helix and β3/β4 hairpin of preF. This region is located between the epitopes recognized by D25, MPE8, and motavizumab, explaining the unusual competition profile observed for this class of antibodies (See, e.g., FIG. 8). In addition to the three primarily preF-specific sites, a large number of the antibodies that recognized antigenic site IV were preF-specific, likely due to contacts with β22, which dramatically rearranges during the transition from pre- to postF. In summary, the epitope mapping data show that the large majority of isolated antibodies target six dominant antigenic sites, approximately half of which are exclusively expressed on preF.

Highly Potent Neutralizing Antibodies Target preF-Specific Epitopes

[0210] The antibodies were next tested for neutralizing activity against RSV subtypes A and B using a previously described high-throughput neutralization assay (15). Greater than 60% of the isolated antibodies showed neutralizing activity, and approximately 20% neutralized with high potency (IC₅₀≤0.05 μg/ml) (see, e.g., FIG. 4A and FIG. 4B; Table 3). Notably, several clonally unrelated antibodies were ≥5.0-fold more potent than D25 and ≥100-fold more potent than palivizumab (see, e.g., FIG. 4A; Table 3). Interestingly, there was no correlation between neutralization potency and level of SHM, suggesting that extensive SHM is not required for potent neutralization of RSV. Consistent with the binding cross-reactivity data, the majority of neutralizing antibodies showed activity against both subtype A and B (FIG. 4A through FIG. 4C; Table 3).

[0211] The relationship between preF- and postF-binding affinity and neutralization potency was next investigated, which clearly demonstrated that the majority of highly potent antibodies bound preferentially or exclusively to preF (see, e.g., FIG. 4D through FIG. 4G; Table 3). Quantifying this difference revealed that more than 80% of highly potent antibodies (IC₅₀<0.05 μg/ml) were specific for preF (See, e.g., FIG. 9; Table 3) and that the median IC₅₀ for preF-specific antibodies was more than 8-fold lower than for pre- and postF cross-reactive antibodies and 80-fold lower than antibodies that specifically recognized postF (see, e.g., FIG. 4E; Table 3). Importantly, there was a positive correlation between preF binding and neutralization (P<0.001, r=0.24), and the apparent preF K_{D}s generally corresponded well with the neutralization IC₅₀s (see, e.g., FIG. 5A; Table 3). In contrast, there was no correlation between neutralization potency and postF affinity (P=0.44, r=−0.07) (see, e.g., FIG. 5B; Table 3). This result is compatible with the occupancy model of antibody-mediated neutralization (47), and suggests that DS-Cav1 is a faithful antigenic mimic of the native preF trimer. Notably, very few antibodies neutralized with IC₅₀s lower than 100 pM, which is consistent with the previously proposed ceiling to affinity maturation (48, 49).

[0212] The relationship between neutralization potency and antigenic site was next analyzed. The results, provided in, e.g., FIG. 5C, Table 3, and Table 4, collectively, indicated that over 60% of the highly potent neutralizing antibodies targeted antigenic sites ø and V, which are two of the three prefusion-F specific sites. In contrast, antibodies targeting sites III and IV showed a wide range of neutralization potencies, and antibodies targeting sites I and II were generally moderate to non-neutralizing. Similar results were obtained using binding affinities and neutralization potencies measured for subtype B (See, e.g., FIG. 10A through FIG. 10C; Table 3 and Table 4). Interestingly, a subset of site IV-directed antibodies neutralized with substantially lower potency than would be expected based on preF binding affinity (see, e.g., FIG. 5A; Table 3). This result may suggest that certain epitopes within site IV are less exposed in the context of the native envelope spike expressed on the crowded surface of the virion than on recombinant preF.

### Several Antibodies Cross-Neutralize RSV and HMPV

[0213] Given that the RSV and human metapneumovirus (HMPV) F proteins share 33% amino acid identity, and certain RSV F-specific antibodies cross-neutralize HMPV (17, 50), the antibodies from this donor were tested for neutralizing activity against HMPV. Of the 123 antibodies tested, three neutralized HMPV (see, e.g., Table 5). Sequence analysis revealed that the three antibodies represent two different clonal families, which utilize different VH germline genes and have varying CDRH3 lengths and levels of somatic hypermutation (See, e.g., Table 2 and sequence listing). All of the cross-neutralizing antibodies bound exclusively to preF and competed with MPE8 (See, e.g., Table 5), in agreement with previous studies indicating that MPE8 cross-neutralizes four pneumoviruses, including RSV and HMPV (17). This result suggests, inter alia, that highly conserved epitopes are relatively immunogenic in the context of natural RSV and/or HMPV infection.

### Discussion

[0214] An in-depth understanding of the human antibody response to RSV infection will aid the development and evaluation of RSV vaccine and therapeutic and/or prophylactic antibody candidates for the treatment and/or prevention of RSV infection. Although previous studies have coarsely mapped the epitopes targeted by RSV-specific neutralizing antibodies in human sera (4, 8), the specificities and functional properties of antibodies induced by natural RSV infection have remained largely undefined. As disclosed herein, preF- and postF-stabilized proteins (11, 15), a high-throughput antibody isolation platform, and a structure-guided collection of prefusion F mutants, were used to clonally dissect the human memory B cell response to RSV F in a naturally infected adult donor, and highly potent and selective RSV-neutralizing—as well as highly potent anti-RSV/anti-HMPV cross-selective and cross-neutralizing—were isolated and characterized.

[0215] In the repertoire analyzed, the ratio of preF-specific antibodies to those that recognize both pre- and postF was slightly greater than 1:1 (See, e.g., FIG. 2B). These values are somewhat lower than those reported for human sera, which showed approximately 70% of anti-F serum binding is specific for preF (8). This discrepancy may be the result of differences between the levels of individual antibodies in serum, differences in the B cell phenotypes achieved for a particular specificity, or variation between donors. Despite these minor differences, the results of both studies suggest that preF-specific epitopes and epitopes shared by pre- and postF are immunogenic during natural RSV infection, whereas the unique surfaces on postF are significantly less immunogenic.

[0216] The repertoire analysis disclosed herein revealed that the large majority of RSV F-specific antibodies target six dominant antigenic sites on prefusion RSV F: øI, II, III, IV, and V. These sites were defined based on previously determined structures, epitope binning/competition assays, resistance mutations, and secondary structure elements of the preF protein. It is important to note that the nomenclature for describing RSV F antigenic sites has evolved over time (6, 51-57), and previous mapping efforts were based on the postfusion conformation of F and did not include surfaces present exclusively on preF. The crystal structure of preF has provided critical information about F structure and function as well as new reagents to map antibody binding sites on the unique surfaces of preF and surfaces shared with postF. To a first approximation, each antibody can be assigned primarily to one of these sites. However, it is likely that antibody epitopes cover the entire surface of F and that there are antibodies that bind two or more adjacent antigenic sites within a protomer and quaternary antibodies that bind across protomers.

[0217] Importantly, the results disclosed herein show that the most potently neutralizing antibodies target antigenic sites ø and V, both of which are located near the apex of the preF trimer. These findings are consistent with results obtained from human sera mapping, which determined that the majority of neutralizing activity can be removed by pre-incubation with preF (4, 8) and that preF-specific sites other than site ø make up a considerable fraction of preF-specific neutralizing antibodies (8). Although antigenic site ø has been shown to be a target of potently neutralizing antibodies (8, 10), the interaction of antibodies with site V is less well understood. Interestingly, it was found that the majority of site V-directed antibodies share several convergent sequence features, suggesting that it may be possible to rapidly detect these types of antibodies in human samples using high-throughput sequencing technology (58). Applicant anticipates this finding to be particularly advantageous in profiling antibody responses to RSV vaccine candidates that aim to preserve the apex of the preF trimer.

[0218] The extensive panel of antibodies described here provides new opportunities for passive prophylaxis, as well as for treatment of RSV infection. A large number of these antibodies neutralize RSV more potently than D25, which serves as the basis for MEDI8897—a monoclonal antibody that is currently in clinical trials for the prevention of RSV in young, at risk children (59). Additionally, a subset of these antibodies were demonstrated to cross-neutralize HMPV.

[0219] The development of an effective RSV vaccine has presented a number of unique challenges, and selection of the optimal vaccination strategy will be of the utmost importance. The in-depth analysis of the human antibody response to natural RSV infection presented here provides insights for the development of such a vaccine. Importantly, the results suggest that immunization of pre-immune donors with preF immunogens would be expected to boost neutralizing responses, whereas the use of postF immunogens would likely expand B cell clones with moderate or weak neutralizing activity. Similarly, immunization of RSV naïve infants with preF immunogens would be expected to activate naïve B cells targeting epitopes associated with substantially more potent neutralizing activity compared to postF immunogens. In addition, the ideal RSV vaccine should preserve antigenic sites ø and V, since these sites are targeted by the most highly potent antibodies elicited in response to natural RSV infection.

[0220] Accordingly, disclosed herein are highly selective and potent anti-RSV antibodies, nucleic acids molecules encoding these antibodies, as well as highly potent cross-neutralizing anti-RSV and anti-HMPV antibodies, as well as vaccine candidates, for the treatment and or prophylaxis of RSV and/or HMPV infection. Additionally, the reagents disclosed here provide a useful set of tools for the evaluation of clinical trials, which will be critical for selecting the optimal RSV vaccination or antibody-based therapeutic strategy from the many currently under investigation (60).

TABLE 1
Antigenic sites targeted by prototypic RSV antibodies

| Antigenic site | Prototypic antibodies |
|---|---|
| Ø | D25, 5C4, AM22 (10,16) |
| I | 131-2a, 2F |
| II | 1129, palivizumab, motavisumab (6) |
| III | MPE8 (17) |
| IV | 101F (57), mAb 19 (19) |

TABLE 2
Germline usage and sequence information of anti-RSV antibodies

| | | VH | LC | | | | Number of | Number of |
|---|---|---|---|---|---|---|---|---|
| | Antibody | germline | germline | | | | nucleotide | nucleotide |
| | number | gene | gene | CDR H3 | CDR L3 | Lineage | substitutions | substitutions |
| Name | (Ab #) | usage | usage | Sequence | Sequence | number | in VH | in VL |
| ADI- | 1 | VH1-8 | VK1-5 | ARPDIN | QQYKS | 38 | 31 | 13 |
| 14438 | | | | WGQDA | DPT | | | |
| | | | | FDV | | | | |
| ADI- | 2 | VH1-69 | VK3-20 | AIIDPQ | QQYGS | 3 | 42 | 16 |
| 14439 | | | | DCTAA | APIT | | | |
| | | | | SCFWV | | | | |
| | | | | NWLDP | | | | |
| ADI- | 3 | VH1-69 | VK3-20 | AIIDPQ | QQFGA | 3 | 31 | 14 |
| 14440 | | | | LCTRAS | LPIT | | | |
| | | | | CFWVN | | | | |
| | | | | WLDP | | | | |
| ADI- | 4 | VH1-69 | VK3-15 | ATAGW | QQYNN | 54 | 29 | 2 |
| 14441 | | | | FGESVH | WPPLT | | | |
| | | | | LDS | | | | |
| ADI- | 5 | VH1-18 | VK2-30 | ARDVP | MQGSH | 22 | 15 | 6 |
| 14442 | | | | ADGVH | WAPT | | | |
| | | | | FMDV | | | | |
| ADI- | 6 | VH1-69 | VK2-40 | ATKRY | MQRVE | 56 | 20 | 3 |
| 14443 | | | | CSDPSC | FPYT | | | |
| | | | | HGLWY | | | | |
| | | | | FDL | | | | |
| ADI- | 7 | VH1-46 | VL2-14 | ARIGSN | CSFTSS | 34 | 38 | 16 |
| 14444 | | | | EI | GSRV | | | |
| ADI- | 8 | VH1-69 | VK3-20 | AIIDPQ | QQYDS | 3 | 43 | 16 |
| 14445 | | | | DCTRA | APIT | | | |
| | | | | SCFWV | | | | |
| | | | | NWLDP | | | | |
| ADI- | 9 | VH1-69 | VK2-40 | ATKRY | MQRIE | 56 | 28 | 5 |
| 14446 | | | | CTSPSC | YPYT | | | |
| | | | | HGLWY | | | | |
| | | | | FNL | | | | |
| ADI- | 10 | VH1-69 | VK1-16 | AGSLL | QQYYI | 1 | 29 | 12 |
| 14447 | | | | AGYDR | YPLT | | | |
| | | | | EFDS | | | | |
| ADI- | 11 | VH3-21 | VL1-40 | VRHMN | QSYDRI | 68 | 30 | 9 |
| 14448 | | | | LVMGP | GMYV | | | |
| | | | | FAFDI | | | | |
| ADI- | 12 | VH3-15 | VL1-47 | STGPPY | AAWDD | 60 | 13 | 17 |
| 14449 | | | | KYFDE | NLSGPV | | | |
| | | | | TGYSV | | | | |
| | | | | VDY | | | | |
| ADI- | 13 | VH3-15 | VL1-47 | STGPPY | AAWDD | 60 | 25 | 16 |
| 14450 | | | | SYFDST | SLSGPV | | | |
| | | | | GYSVV | | | | |
| | | | | DY | | | | |
| ADI- | 14 | VH1-2 | VL3-19 | ARSQQ | NCRDSS | 44 | 21 | 15 |
| 14451 | | | | LLVITD | GHRLV | | | |
| | | | | YSLDY | | | | |
| ADI- | 15 | VH1-69 | VK2-40 | ATKRY | MQRVE | 56 | 26 | 4 |
| 14452 | | | | CTSPSC | YPYS | | | |
| | | | | HGLWY | | | | |
| | | | | FNL | | | | |
| ADI- | 16 | VH2-5 | VK1-39 | AHIGLY | QHTYT | 2 | 14 | 15 |
| 14453 | | | | DRGGY | TPYI | | | |
| | | | | YLFYFDF | | | | |
| ADI- | 17 | VH2-5 | VK1-39 | VHSDL | QQAYS | 65 | 13 | 12 |
| 14454 | | | | YDSGG | APYT | | | |
| | | | | YYLYY | | | | |
| | | | | FDY | | | | |
| ADI- | 18 | VH1-18 | VK2-30 | ARDVP | MQGPH | 23 | 3 | 0 |
| 14455 | | | | VIAAGT | WPRT | | | |
| | | | | MDY | | | | |
| ADI- | 19 | VH1-2 | VK1-39 | AKDRA | QQSFTI | 6 | 32 | 13 |
| 14456 | | | | ASVHV | PSIT | | | |
| | | | | PAGAF | | | | |
| | | | | DL | | | | |
| ADI- | 20 | VH2-70 | VK1-39 | ARTLY | QQSYSS | 46 | 29 | 20 |
| 14457 | | | | YTSGG | TPT | | | |
| | | | | YYLNL | | | | |
| | | | | FDY | | | | |
| ADI- | 21 | VH3-15 | VL1-47 | TTGPPY | ASWDD | 60 | 12 | 15 |
| 14458 | | | | SYFDST | SLSGPV | | | |
| | | | | GYSIVDY | | | | |
| ADI- | 22 | VH3-15 | VL1-47 | STGPPY | AMWD | 60 | 7 | 7 |
| 14459 | | | | KYHDS | DSLNGPV | | | |
| | | | | TGYSV | | | | |
| | | | | VDY | | | | |
| ADI- | 23 | VH4-34 | VL2-14 | TRSETS | GSYTD | 63 | 32 | 13 |
| 14460 | | | | DYFDSS | TNRL | | | |
| | | | | GYAFHI | | | | |
| ADI- | 24 | VH3-30 | VL2-8 | ARDQW | SSYAGS | 18 | 8 | 5 |
| 14461 | | | | LVPDY | NSV | | | |
| ADI- | 25 | VH3-33 | VL2-14 | ATERM | TSYTSR | 55 | 19 | 8 |
| 14462 | | | | WEENS | SSYV | | | |
| | | | | SSFGW | | | | |
| ADI- | 26 | VH1-18 | VK2-30 | ARDVP | MQGTH | 24 | 31 | 16 |
| 14463 | | | | VMGAA | WPPT | | | |
| | | | | FLDY | | | | |
| ADI- | 27 | VH1-18 | VK1-39 | AKDRA | QQSYTI | 6 | 28 | 9 |
| 14464 | | | | ASVHV | PSIT | | | |
| | | | | PAGEFDL | | | | |
| ADI- | 28 | VH4-34 | VL3-21 | ARQRL | QVWDN | 40 | 30 | 22 |
| 14465 | | | | EHTAS | SSDQPV | | | |
| | | | | GYYMDV | | | | |
| ADI- | 29 | VH5-a | VK4-1 | ARHKE | QQYFTS | 32 | 18 | 20 |
| 14466 | | | | NYDFW | TF | | | |
| | | | | DF | | | | |
| ADI- | 30 | VH1-18 | VK2-30 | VRDVP | MQATQ | 67 | 20 | 3 |
| 14467 | | | | VISGAS | WPRT | | | |
| | | | | TMDY | | | | |
| ADI- | 31 | VH2-5 | VK1-39 | VKSDL | QQTFSS | 65 | 27 | 24 |
| 14468 | | | | YDRGG | PYT | | | |
| | | | | YYLYY | | | | |
| | | | | FDH | | | | |
| ADI- | 32 | VH2-5 | VK1-39 | VKSDL | QQTFSS | 65 | 18 | 22 |
| 14469 | | | | YDRGG | PYT | | | |
| | | | | YYLYY | | | | |
| | | | | FDY | | | | |
| ADI- | 33 | VH2-70 | VK1-39 | VRSSV | QQAYS | 70 | 13 | 12 |
| 14470 | | | | YASNA | SPYT | | | |
| | | | | YYLYY | | | | |
| | | | | FDS | | | | |
| ADI- | 34 | VH1-69 | VK2-40 | ATKRY | MQRAE | 56 | 19 | 2 |
| 14471 | | | | CSDPSC | FPYT | | | |
| | | | | HGLWY | | | | |
| | | | | FDL | | | | |
| ADI- | 35 | VH5-a | VK4-1 | ARHKE | QQYYS | 32 | 8 | 10 |
| 14473 | | | | NYDFW | SAF | | | |
| | | | | DF | | | | |
| ADI- | 36 | VH1-18 | VK2-30 | ARDVP | MQGTH | 24 | 35 | 14 |
| 14474 | | | | VMGAA | WPPT | | | |
| | | | | FLDY | | | | |
| ADI- | 37 | V H2-70 | VK1-39 | VRTPIY | QQSYST | 70 | 10 | 15 |
| 14475 | | | | ASGGY | PYT | | | |
| | | | | YLSYFDS | | | | |
| ADI- | 38 | VH2-5 | VK1-39 | VHSDR | QQSYTS | 65 | 17 | 15 |
| 14476 | | | | YDRGG | PYT | | | |
| | | | | YYLYFF | | | | |
| | | | | DY | | | | |
| ADI- | 39 | VH2-5 | VK1-39 | VHSDL | QQSYTF | 65 | 15 | 14 |
| 14477 | | | | YDRGG | PYT | | | |
| | | | | YYLFYF | | | | |
| | | | | DD | | | | |
| ADI- | 40 | VH3-11 | VL1-40 | ARDQR | QSYDN | 17 | 2 | 5 |
| 14478 | | | | DQAVA | SLSGSAV | | | |
| | | | | GRWFDP | | | | |
| ADI- | 41 | VH1-2 | VK2-28 | ARTMW | MQALQ | 47 | 23 | 2 |
| 14479 | | | | RWLVE | TPLT | | | |
| | | | | GGFEN | | | | |
| ADI- | 42 | VH1-69 | VK3-15 | ATAGW | QQYNN | 54 | 48 | 8 |
| 14480 | | | | FGELVR | WPPLT | | | |
| | | | | FDS | | | | |
| ADI- | 43 | VH4-34 | VL3-21 | ARASS | QVWDD | 8 | 22 | 11 |
| 14482 | | | | GTYNF | PSDHAV | | | |
| | | | | EYWFDP | | | | |
| ADI- | 44 | VH3-21 | VL1-40 | ARDWG | QSYDR | 26 | 29 | 2 |
| 14483 | | | | GHSIFG | SLSQV | | | |
| | | | | AVQDL | | | | |
| ADI- | 45 | VH2-70 | VK1-39 | ARTLY | QQSYSS | 46 | 29 | 20 |
| 14484 | | | | YTSGG | TPT | | | |
| | | | | YYLNL | | | | |
| | | | | FDY | | | | |
| ADI- | 46 | VH1-69 | VK3-15 | ARPEG | QQYDD | 39 | 28 | 7 |
| 14485 | | | | DFGDL | WPPQLT | | | |
| | | | | KWLRS | | | | |
| | | | | PFDY | | | | |
| ADI- | 47 | VH4- | VL2-14 | ARHPS | SSYTGS | 33 | 18 | 8 |
| 14486 | | 304 | | VIYGTF | NTVI | | | |
| | | | | GANGG | | | | |
| | | | | PNWFDP | | | | |
| ADI- | 48 | VH1-2 | VK2-28 | ARVTW | MQALH | 52 | 17 | 2 |
| 14487 | | | | QWLVL | TPLT | | | |
| | | | | GGFDY | | | | |
| ADI- | 49 | VH3-73 | VL2-14 | TLGYCS | SSYTSS | 62 | 11 | 1 |
| 14488 | | | | GDSCSS | STLV | | | |
| | | | | LRDY | | | | |
| ADI- | 50 | VH1-18 | VK2-30 | ARDVP | MQGSH | 22 | 14 | 6 |
| 14489 | | | | ADGVH | WAPT | | | |
| | | | | FMDV | | | | |
| ADI- | 51 | VH3-33 | VL1-40 | ARDAIF | QSYESS | 9 | 4 | 1 |
| 14490 | | | | GSGPN | LRGWV | | | |
| | | | | WFDP | | | | |
| ADI- | 52 | VH3-30 | VL2-8 | ARDQW | SSYAGS | 18 | 8 | 5 |
| 14491 | | | | LVPDY | NSV | | | |
| ADI- | 53 | VH3-15 | VL1-47 | TTGPPY | AAWDD | 60 | 15 | 14 |
| 14492 | | | | QYFDD | SLGGPV | | | |
| | | | | SGYSV | | | | |
| | | | | VDY | | | | |
| ADI- | 54 | VH4-34 | VL3-21 | AKASS | QVWDD | 4 | 25 | 22 |
| 14493 | | | | GSYHFE | ADDHAV | | | |
| | | | | YWFDP | | | | |
| ADI- | 55 | VH3-30 | VL2-8 | ARDQW | SSYAGS | 18 | 8 | 5 |
| 14494 | | | | LVPDY | NSV | | | |
| ADI- | 56 | VH2-5 | VK1-39 | VHSDL | QQSYTF | 65 | 12 | 14 |
| 14495 | | | | YDRGG | PYT | | | |
| | | | | YYLFYF | | | | |
| | | | | DY | | | | |
| ADI- | 57 | VH5-51 | VK1-33 | GRQEL | QHYDN | 59 | 17 | 9 |
| 14496 | | | | QGSFTI | LLLFT | | | |
| ADI- | 58 | VH2-5 | VK1-39 | VHSDL | QQVYT | 65 | 13 | 15 |
| 14497 | | | | YDSGG | SPYT | | | |
| | | | | YYLYY | | | | |
| | | | | FDY | | | | |
| ADI- | 59 | VH2-5 | VK1-39 | VHSDL | QQSYSI | 65 | 11 | 7 |
| 14498 | | | | YDRNA | PYT | | | |
| | | | | YYLHY | | | | |
| | | | | FDF | | | | |
| ADI- | 60 | VH2-5 | VK1-39 | VHSDL | QQSYTS | 65 | 19 | 11 |
| 14499 | | | | YDSSG | PYT | | | |
| | | | | YYLYY | | | | |
| | | | | FDY | | | | |
| ADI- | 61 | VH3-15 | VL1-47 | TTGPPY | AAWDD | 60 | 13 | 2 |
| 14500 | | | | KYSDST | RLSGPV | | | |
| | | | | GYSVV | | | | |
| | | | | DY | | | | |
| ADI- | 62 | VH1-69 | VK3-15 | ATAGW | QQYNN | 54 | 34 | 4 |
| 14501 | | | | FGELVR | WPPLT | | | |
| | | | | FDS | | | | |
| ADI- | 63 | VH1-69 | VK1-12 | ARVAG | QQAKS | 49 | 14 | 15 |
| 14502 | | | | LGNSY | FPYT | | | |
| | | | | GRYFDV | | | | |
| ADI- | 64 | VH3-21 | VL3-21 | AREGS | QVWDS | 27 | 21 | 9 |
| 14503 | | | | DTEYW | GDHPWL | | | |
| | | | | RLTPPM | | | | |
| | | | | DV | | | | |
| ADI- | 65 | VH3-48 | VK3-15 | ARDLS | QQYDR | 14 | 8 | 3 |
| 14504 | | | | GSPAYS | WPPWT | | | |
| | | | | GSWV | | | | |
| ADI- | 66 | VH1-2 | VK4-1 | ASEPPG | QQYFSI | 53 | 13 | 8 |
| 14505 | | | | VGFGLI | PPT | | | |
| | | | | PHYYF | | | | |
| | | | | DN | | | | |
| ADI- | 67 | VH1-69 | VK3-15 | ARPAG | QEYND | 37 | 30 | 11 |
| 14506 | | | | DFGDL | WPPQLS | | | |
| | | | | KWVRS | | | | |
| | | | | PFDY | | | | |
| ADI- | 68 | VH2-5 | VK1-39 | VHSDV | QQSYSS | 65 | 11 | 12 |
| 14507 | | | | YTTGG | PYT | | | |
| | | | | YYLYY | | | | |
| | | | | FDY | | | | |
| ADI- | 69 | VH1-18 | VK2-30 | ARDSG | MQATH | 19 | 41 | 8 |
| 14508 | | | | ATAAGI | WPRT | | | |
| | | | | LWDY | | | | |
| ADI- | 70 | VH1-18 | VK2-30 | ARDVP | MEGSH | 22 | 26 | 11 |
| 14509 | | | | ADGVH | WAPT | | | |
| | | | | FMDV | | | | |
| ADI- | 71 | VH1-69 | VK3-20 | AIIDPQ | QQYGT | 3 | 39 | 17 |
| 14510 | | | | DCTSAS | SPIT | | | |
| | | | | CFWVN | | | | |
| | | | | WLDP | | | | |
| ADI- | 72 | VH1-69 | VK3-15 | ARPAG | QQYND | 37 | 22 | 6 |
| 14511 | | | | DFGDL | WPPQLT | | | |
| | | | | KWLRS | | | | |
| | | | | PFDY | | | | |
| ADI- | 73 | VH1-69 | VK3-15 | ARPER | QQYND | 39 | 22 | 5 |
| 14512 | | | | DFGHL | WPPQLT | | | |
| | | | | KWLRS | | | | |
| | | | | PFDY | | | | |
| ADI- | 74 | VH1-69 | VK3-20 | AIIDPQ | QQYGS | 3 | 37 | 15 |
| 14513 | | | | DCTRA | APIT | | | |
| | | | | SCFWV | | | | |
| | | | | NWLAP | | | | |
| ADI- | 75 | VH1-18 | VK2-30 | ARDVP | MEGSH | 22 | 22 | 10 |
| 14514 | | | | GDGVH | WAPT | | | |
| | | | | FMDV | | | | |
| ADI- | 76 | VH3-30 | VK3-15 | ARNTIF | QQYNN | 36 | 16 | 6 |
| 14515 | | | | GVVDY | WPPWT | | | |
| ADI- | 77 | VH1-18 | VK2-30 | ARDKG | MESTH | 12 | 16 | 2 |
| 14516 | | | | VTVAG | WPPYT | | | |
| | | | | SLLDY | | | | |
| ADI- | 78 | VH1-18 | VK2-30 | ARDSPS | MQATH | 21 | 38 | 4 |
| 14518 | | | | DTAAA | WPRLS | | | |
| | | | | LLDF | | | | |
| ADI- | 79 | VH1-24 | VK1-39 | ATVIAV | QQSYII | 58 | 31 | 13 |
| 14519 | | | | GAYDI | PYT | | | |
| ADI- | 80 | VH4-34 | VL3-21 | ARASS | QVWDD | 8 | 15 | 10 |
| 14520 | | | | GSYNFE | PSDHAV | | | |
| | | | | YWFDP | | | | |
| ADI- | 81 | VH1-18 | VK2-30 | ARDPPS | MQATD | 16 | 16 | 5 |
| 14521 | | | | LTAAG | WPRT | | | |
| | | | | TLDY | | | | |
| ADI- | 82 | VH1-2 | VK3-15 | ARDLY | HQYND | 15 | 26 | 10 |
| 14522 | | | | SSGWL | WPYT | | | |
| | | | | DN | | | | |
| ADI- | 83 | VH3-15 | VL1-47 | STGPPY | AAWDD | 60 | 18 | 14 |
| 14523 | | | | SYFDSS | SLSGPV | | | |
| | | | | GYSVV | | | | |
| | | | | DY | | | | |
| ADI- | 84 | VH3-48 | VK3-20 | VRSLH | QQSGSS | 69 | 14 | 8 |
| 14524 | | | | WGAAI | PYT | | | |
| | | | | ERWDV | | | | |
| ADI- | 85 | VH3-30 | VL2-8 | ARDQW | SSYAGS | 18 | 9 | 5 |
| 14525 | | | | LVPDY | NSV | | | |
| ADI- | 86 | VH4- | VL3-25 | ARGRG | QSSDSS | 30 | 33 | 11 |
| 14526 | | 304 | | YSYGW | GNYVV | | | |
| | | | | RYFDS | | | | |
| ADI- | 87 | VH1-69 | VK3-20 | AIIDPQ | QQYGS | 3 | 46 | 11 |
| 14527 | | | | DCTAA | SPIT | | | |
| | | | | SCFWV | | | | |
| | | | | NWLDP | | | | |
| ADI- | 88 | VH1-69 | VK3-15 | ARPAG | QEYND | 37 | 29 | 8 |
| 14528 | | | | DFGDL | WPPQLT | | | |
| | | | | KWVRS | | | | |
| | | | | PFDY | | | | |
| ADI- | 89 | VH3-15 | VL1-40 | STGPPY | AAWDD | 60 | 18 | 22 |
| 14529 | | | | SYFDSS | SLSGPV | | | |
| | | | | GYSVV | | | | |
| | | | | DY | | | | |
| ADI- | 90 | VH1-69 | VK3-15 | ARPEG | QEYND | 39 | 26 | 8 |
| 14530 | | | | DFGDL | WPPQLT | | | |
| | | | | KWVRS | | | | |
| | | | | PFDY | | | | |
| ADI- | 91 | VH1-69 | VK3-20 | AIIDPQ | QQYET | 3 | 37 | 13 |
| 14531 | | | | DCTRA | SPIT | | | |
| | | | | SCFWV | | | | |
| | | | | NWLAP | | | | |
| ADI- | 92 | VH3-15 | VL1-47 | STGPPY | AAWDD | 60 | 19 | 14 |
| 14532 | | | | SYFDSS | SLSGPV | | | |
| | | | | GYSVV | | | | |
| | | | | DY | | | | |
| ADI- | 93 | VH1-69 | VL1-36 | ARDLQ | AAWDD | 13 | 26 | 10 |
| 14533 | | | | TGIMSS | SLNGWV | | | |
| | | | | VRSEY | | | | |
| | | | | RGFMDP | | | | |
| ADI- | 94 | VH3-30 | VL3-21 | AKSSRL | QVWDN | 7 | 17 | 10 |
| 14534 | | | | LDWLY | SNSQGV | | | |
| | | | | NMDF | | | | |
| ADI- | 95 | VH4- | VL3-25 | ARGRG | QSSDSS | 30 | 32 | 9 |
| 14535 | | 304 | | YTYGW | GNVVL | | | |
| | | | | RYFDY | | | | |
| ADI- | 96 | VH3-30 | VK1-5 | ARDSG | QQYSS | 20 | 17 | 11 |
| 14536 | | | | TLTGLP | YSWT | | | |
| | | | | HDAFDI | | | | |
| ADI- | 97 | VH3-15 | VL1-47 | STGPPY | AAWDD | 60 | 19 | 14 |
| 14537 | | | | SYFDSS | SLSGPV | | | |
| | | | | GYSVV | | | | |
| | | | | DY | | | | |
| ADI- | 98 | VH3-30 | VL3-21 | AKSSRF | QVWDN | 7 | 18 | 14 |
| 14538 | | | | LDWLY | SHSQGV | | | |
| | | | | NMDF | | | | |
| ADI- | 99 | VH3-33 | VK1-5 | ARDSG | HHYNS | 20 | 23 | 10 |
| 14539 | | | | TLTGLP | YSWT | | | |
| | | | | HDAFDV | | | | |
| ADI- | 100 | VH3-30 | VK4-1 | ARDGD | QQYSSP | 11 | 13 | 5 |
| 14540 | | | | LVAVP | PYT | | | |
| | | | | AAIGFDS | | | | |
| ADI- | 101 | VH3-21 | VL1-40 | ARVIGD | QSYDSS | 50 | 26 | 4 |
| 14541 | | | | GTILGV | LSVI | | | |
| | | | | VFDY | | | | |
| ADI- | 102 | VH5-51 | VL6-57 | TIILIPA | QSYDSS | 61 | 10 | 6 |
| 14542 | | | | PIRAPD | YHVV | | | |
| | | | | GFDI | | | | |
| ADI- | 103 | VH1-69 | VK1-12 | ARVAG | QQANS | 49 | 14 | 7 |
| 14543 | | | | LGNSY | FPYT | | | |
| | | | | GRYPDL | | | | |
| ADI- | 104 | VH5-51 | VL3-21 | ARMLA | QVWDS | 35 | 14 | 5 |
| 14544 | | | | SVGLSN | ISDHVL | | | |
| | | | | FDA | | | | |
| ADI- | 105 | VH3-15 | VK1-39 | TSHAY | QQCYS | 64 | 9 | 8 |
| 14545 | | | | NSDWF | APIT | | | |
| | | | | VTTDY | | | | |
| | | | | YYYMDV | | | | |
| ADI- | 106 | VH1-69 | VK3-20 | ARGISP | HHYGT | 29 | 22 | 11 |
| 14546 | | | | RTNSD | SPHT | | | |
| | | | | WNHNY | | | | |
| | | | | FYYYM | | | | |
| | | | | DV | | | | |
| ADI- | 107 | VH2-26 | VK2-30 | ARVLT | MQGSH | 51 | 24 | 11 |
| 14547 | | | | TWHGP | WPHT | | | |
| | | | | DY | | | | |
| ADI- | 108 | VH3-7 | VL3-21 | ARDVW | QVWDS | 25 | 11 | 6 |
| 14548 | | | | GWELV | SRDHVV | | | |
| | | | | GWLDP | | | | |
| ADI- | 109 | VH2-70 | VK1-39 | ARTPIY | QQSYST | 48 | 7 | 0 |
| 14549 | | | | DSSGY | PVT | | | |
| | | | | YLYYF | | | | |
| | | | | DS | | | | |
| ADI- | 110 | VH3-30 | VK4-1 | ARDGDI | QQYSSP | 10 | 13 | 5 |
| 14550 | | | | VAVPA | PYT | | | |
| | | | | AIGLDY | | | | |
| ADI- | 111 | VH4-b | VL3-25 | ARGRG | QSGDTS | 30 | 37 | 9 |
| 14551 | | | | YSYGW | GSYVV | | | |
| | | | | RFFDN | | | | |
| ADI- | 112 | VH1-69 | VK3-20 | ARSRK | QQYGR | 45 | 30 | 13 |
| 14552 | | | | NVIGDT | SMT | | | |
| | | | | SAWEH | | | | |
| | | | | MYFYM | | | | |
| | | | | DV | | | | |
| ADI- | 113 | VH1-69 | VK3-20 | ARSNP | QQYGA | 43 | 17 | 16 |
| 14553 | | | | VARDF | SAFS | | | |
| | | | | WSGYS | | | | |
| | | | | DDSSY | | | | |
| | | | | AMDV | | | | |
| ADI- | 114 | VH3-15 | VL1-47 | TTGPPY | AAWDD | 60 | 7 | 4 |
| 14554 | | | | KYFDST | RMSGPV | | | |
| | | | | GYSVV | | | | |
| | | | | DY | | | | |
| ADI- | 115 | VH3-23 | VK3-11 | AKAYC | HQRSD | 5 | 16 | 7 |
| 14555 | | | | SNKAC | WPLT | | | |
| | | | | HGGYF | | | | |
| | | | | DY | | | | |
| ADI- | 116 | VH3-7 | VK3-11 | ARESGL | QHRSD | 28 | 12 | 7 |
| 14556 | | | | PRGAF | WWT | | | |
| | | | | QI | | | | |
| ADI- | 117 | VH4-34 | VK3-20 | ARGRK | QQYGS | 31 | 18 | 5 |
| 14557 | | | | LFEVPP | SPQT | | | |
| | | | | KAPDY | | | | |
| ADI- | 118 | VH3-23 | VK3-11 | AKAYC | QQRST | 5 | 14 | 6 |
| 14558 | | | | SDSCH | WPLT | | | |
| | | | | GGYFDY | | | | |
| ADI- | 119 | VH3-15 | VL1-47 | TTGPPY | AAWDD | 60 | 9 | 14 |
| 14559 | | | | QYYDS | SLSGPV | | | |
| | | | | TGYSV | | | | |
| | | | | VDY | | | | |
| ADI- | 120 | VH5-51 | VK3-11 | ARQTT | QQRSN | 41 | 12 | 4 |
| 14560 | | | | MTPDA | WGVGT | | | |
| | | | | FDL | | | | |
| ADI- | 121 | VH1-69 | VK3-20 | ARSKR | HHFGT | 42 | 22 | 15 |
| 14561 | | | | LPAGLS | TPWT | | | |
| | | | | TSDYY | | | | |
| | | | | YYYLDV | | | | |
| ADI- | 122 | VH1-69 | VK1-12 | ATVAG | QQAKS | 57 | 29 | 12 |
| 14562 | | | | LGTSY | FPYT | | | |
| | | | | GRYLES | | | | |
| ADI- | 123 | VH3-48 | VK3-11 | VRDSR | QQRRN | 66 | 21 | 2 |
| 14563 | | | | GPTTQ | WPPLT | | | |
| | | | | WLTGY | | | | |
| | | | | FDF | | | | |

TABLE 3
Affinity and Neutralization data for anti-RSV antibodies

| | | | | | | Neut IC₅₀ | Neut IC₅₀ |
|---|---|---|---|---|---|---|---|
| | | Prefusion | Postfusion | Prefusion | Postfusion | (μg/ml) | (μg/ml) |
| | Antibody | subtype A | subtype A | subtype B | subtype B | subtype | subtype |
| Name | number (Ab #) | K_{D} (M)* | K_{D} (M)* | K_{D} (M)* | K_{D} (M)* | A* | B* |
| ADI- | 1 | 4.35E−09 | 1.18E−08 | 8.92E−09 | 8.29E−09 | 0.289 | 0.237 |
| 14438 | | | | | | | |
| ADI- | 2 | 2.28E−08 | 5.16E−09 | 2.25E−08 | 1.62E−08 | >10 | 4.122 |
| 14439 | | | | | | | |
| ADI- | 3 | 1.39E−08 | 1.45E−09 | 8.12E−09 | 2.39E−09 | >10 | 4.180 |
| 14440 | | | | | | | |
| ADI- | 4 | 8.59E−09 | NB | 8.06E−09 | NB | >10 | 3.920 |
| 14441 | | | | | | | |
| ADI- | 5 | 4.73E−10 | NB | 7.28E−10 | NB | 0.002 | 0.015 |
| 14442 | | | | | | | |
| ADI- | 6 | 1.77E−10 | 1.90E−10 | 2.05E−10 | 1.37E−10 | 0.047 | 0.063 |
| 14443 | | | | | | | |
| ADI- | 7 | NB | NB | 8.33E−08 | NB | >10 | >10 |
| 14444 | | | | | | | |
| ADI- | 8 | 3.41E−08 | 4.92E−09 | 3.58E−08 | 1.52E−08 | >10 | 1.213 |
| 14445 | | | | | | | |
| ADI- | 9 | 2.31E−10 | 2.13E−10 | 2.57E−10 | 1.37E−10 | 0.091 | 0.187 |
| 14446 | | | | | | | |
| ADI- | 10 | 4.37E−10 | 3.39E−10 | 5.46E−10 | 2.71E−10 | 0.143 | 0.372 |
| 14447 | | | | | | | |
| ADI- | 11 | 3.81E−10 | NB | 5.96E−10 | NB | 0.043 | 0.066 |
| 14448 | | | | | | | |
| ADI- | 12 | 1.93E−10 | 2.04E−10 | 5.94E−10 | 4.62E−10 | 0.193 | 0.182 |
| 14449 | | | | | | | |
| ADI- | 13 | 1.76E−10 | 2.27E−10 | 2.29E−10 | 1.42E−10 | 0.195 | 0.315 |
| 14450 | | | | | | | |
| ADI- | 14 | 3.16E−10 | NB | 4.96E−10 | NB | 0.020 | 0.060 |
| 14451 | | | | | | | |
| ADI- | 15 | 2.20E−10 | 2.17E−10 | 2.47E−10 | 1.39E−10 | 0.076 | 0.157 |
| 14452 | | | | | | | |
| ADI- | 16 | 3.94E−10 | 2.61E−10 | 6.70E−10 | 2.28E−10 | >10 | >10 |
| 14453 | | | | | | | |
| ADI- | 17 | 7.43E−10 | 2.97E−10 | 6.87E−10 | 4.83E−10 | 0.230 | 2.537 |
| 14454 | | | | | | | |
| ADI- | 18 | 2.14E−09 | NB | 4.40E−09 | NB | 0.012 | 0.036 |
| 14455 | | | | | | | |
| ADI- | 19 | 6.03E−09 | NB | 3.91E−09 | NB | >10 | 0.372 |
| 14456 | | | | | | | |
| ADI- | 20 | 4.66E−10 | 3.80E−10 | 2.03E−09 | 4.61E−10 | 0.200 | 0.251 |
| 14457 | | | | | | | |
| ADI- | 21 | 1.39E−10 | 1.96E−10 | 1.84E−10 | 1.26E−10 | 0.161 | 0.104 |
| 14458 | | | | | | | |
| ADI- | 22 | 2.30E−10 | 2.64E−10 | 3.04E−10 | 1.83E−10 | 0.396 | 0.753 |
| 14459 | | | | | | | |
| ADI- | 23 | 2.69E−10 | 2.86E−09 | 1.09E−09 | 2.56E−09 | 0.102 | 0.239 |
| 14460 | | | | | | | |
| ADI- | 24 | 1.90E−10 | 2.31E−10 | 2.44E−10 | 1.56E−10 | 0.129 | 0.152 |
| 14461 | | | | | | | |
| ADI- | 25 | 1.12E−08 | NB | 1.68E−08 | NB | 2.706 | 2.631 |
| 14462 | | | | | | | |
| ADI- | 26 | 4.25E−10 | NB | 1.86E−09 | NB | 0.009 | 0.036 |
| 14463 | | | | | | | |
| ADI- | 27 | 3.22E−09 | NB | 3.11E−09 | NB | >10 | 0.161 |
| 14464 | | | | | | | |
| ADI- | 28 | 1.22E−09 | NB | 2.74E−09 | NB | 0.431 | 0.124 |
| 14465 | | | | | | | |
| ADI- | 29 | 3.48E−10 | 2.47E−10 | 3.98E−10 | 1.69E−10 | 0.144 | 0.263 |
| 14466 | | | | | | | |
| ADI- | 30 | 4.90E−10 | NB | 2.44E−09 | NB | 0.060 | 0.065 |
| 14467 | | | | | | | |
| ADI- | 31 | 1.51E−09 | 2.97E−10 | 5.52E−10 | 2.41E−10 | 0.241 | 2.412 |
| 14468 | | | | | | | |
| ADI- | 32 | 3.82E−10 | 3.01E−10 | 2.37E−09 | 2.90E−09 | 0.050 | 0.013 |
| 14469 | | | | | | | |
| ADI- | 33 | 5.42E−10 | 3.58E−10 | 5.49E−10 | 3.14E−10 | 0.226 | 0.473 |
| 14470 | | | | | | | |
| ADI- | 34 | 1.69E−10 | 2.12E−10 | 2.17E−10 | 1.50E−10 | 0.096 | 0.116 |
| 14471 | | | | | | | |
| ADI- | 35 | 1.55E−09 | 2.24E−10 | 8.91E−10 | 1.51E−10 | | |
| 14473 | | | | | | | |
| ADI- | 36 | 4.43E−10 | NB | 8.77E−10 | NB | 0.019 | 0.016 |
| 14474 | | | | | | | |
| ADI- | 37 | 3.36E−10 | 2.99E−10 | 5.32E−10 | 2.42E−10 | 0.391 | 0.522 |
| 14475 | | | | | | | |
| ADI- | 38 | 1.95E−09 | 8.27E−10 | 1.14E−08 | 9.12E−09 | 0.929 | 2.186 |
| 14476 | | | | | | | |
| ADI- | 39 | 1.36E−09 | 3.61E−10 | 8.78E−10 | 1.22E−09 | >10 | >10 |
| 14477 | | | | | | | |
| ADI- | 40 | 1.60E−09 | NB | 3.05E−09 | NB | 0.163 | 0.057 |
| 14478 | | | | | | | |
| ADI- | 41 | 3.95E−08 | NB | NB | NB | 4.090 | 22.680 |
| 14479 | | | | | | | |
| ADI- | 42 | 6.43E−09 | NB | 7.57E−09 | NB | >10 | 2.759 |
| 14480 | | | | | | | |
| ADI- | 43 | 1.26E−10 | NB | 2.39E−10 | NB | 0.024 | 0.031 |
| 14482 | | | | | | | |
| ADI- | 44 | 2.67E−10 | NB | 4.85E−10 | 2.00E−08 | 0.031 | 0.030 |
| 14483 | | | | | | | |
| ADI- | 45 | 4.65E−10 | 3.89E−10 | 2.18E−09 | 3.94E−10 | 0.448 | 0.169 |
| 14484 | | | | | | | |
| ADI- | 46 | 6.45E−09 | 1.52E−09 | 7.52E−09 | 6.42E−10 | >10 | 2.813 |
| 14485 | | | | | | | |
| ADI- | 47 | 2.61E−09 | 5.29E−10 | 1.78E−09 | 6.36E−10 | | |
| 14486 | | | | | | | |
| ADI- | 48 | 8.04E−08 | NB | NB | NB | >10 | >10 |
| 14487 | | | | | | | |
| ADI- | 49 | NB | 1.48E−08 | NB | NB | >10 | >10 |
| 14488 | | | | | | | |
| ADI- | 50 | 3.82E−10 | NB | 6.78E−10 | NB | 0.023 | 0.021 |
| 14489 | | | | | | | |
| ADI- | 51 | 9.07E−09 | NB | 2.62E−08 | NB | 1.016 | 0.113 |
| 14490 | | | | | | | |
| ADI- | 52 | 1.83E−10 | 2.38E−10 | 2.37E−10 | 1.58E−10 | 0.105 | 0.102 |
| 14491 | | | | | | | |
| ADI- | 53 | 1.24E−10 | 1.66E−10 | 1.76E−10 | 1.11E−10 | 0.204 | 0.681 |
| 14492 | | | | | | | |
| ADI- | 54 | 9.76E−10 | NB | 3.02E−09 | NB | 0.009 | 1.272 |
| 14493 | | | | | | | |
| ADI- | 55 | 1.75E−10 | 2.40E−10 | 2.32E−10 | 1.55E−10 | 0.084 | 0.089 |
| 14494 | | | | | | | |
| ADI- | 56 | 1.15E−09 | 3.67E−10 | 1.24E−09 | 1.71E−09 | 0.864 | 17.440 |
| 14495 | | | | | | | |
| ADI- | 57 | 1.88E−10 | NB | 6.71E−09 | NB | 0.006 | >10 |
| 14496 | | | | | | | |
| ADI- | 58 | 3.49E−10 | 3.58E−10 | 4.57E−09 | 4.82E−09 | 0.115 | 0.116 |
| 14497 | | | | | | | |
| ADI- | 59 | 5.67E−10 | 4.12E−10 | 1.05E−09 | 2.27E−09 | >10 | >10 |
| 14498 | | | | | | | |
| ADI- | 60 | 1.71E−09 | 4.15E−10 | 3.80E−09 | 2.99E−09 | >10 | >10 |
| 14499 | | | | | | | |
| ADI- | 61 | 6.38E−10 | 7.14E−10 | 9.10E−10 | 1.27E−10 | 0.415 | 0.552 |
| 14500 | | | | | | | |
| ADI- | 62 | 1.59E−08 | NB | 3.47E−08 | NB | 12.350 | 2.288 |
| 14501 | | | | | | | |
| ADI- | 63 | 5.00E−09 | NB | 1.10E−08 | NB | >10 | 2.718 |
| 14502 | | | | | | | |
| ADI- | 64 | 1.12E−10 | 2.61E−08 | 7.76E−10 | | 0.016 | 0.026 |
| 14503 | | | | | | | |
| ADI- | 65 | 4.54E−09 | 5.83E−10 | 1.12E−09 | 5.20E−10 | 2.810 | 13.390 |
| 14504 | | | | | | | |
| ADI- | 66 | 1.56E−10 | NB | 2.90E−10 | NB | 0.065 | 0.018 |
| 14505 | | | | | | | |
| ADI- | 67 | 5.91E−08 | 1.31E−08 | 5.02E−08 | 2.45E−08 | >10 | 6.250 |
| 14506 | | | | | | | |
| ADI- | 68 | 3.13E−10 | 2.66E−10 | 4.69E−10 | 4.13E−10 | 0.319 | 0.173 |
| 14507 | | | | | | | |
| ADI- | 69 | 3.27E−10 | NB | 5.77E−10 | NB | 0.029 | 0.057 |
| 14508 | | | | | | | |
| ADI- | 70 | 3.64E−10 | NB | 6.15E−10 | NB | 0.011 | 0.016 |
| 14509 | | | | | | | |
| ADI- | 71 | 4.13E−09 | 7.83E−10 | 1.96E−09 | 6.19E−10 | >10 | >10 |
| 14510 | | | | | | | |
| ADI- | 72 | 4.14E−09 | 9.88E−10 | 2.60E−09 | 1.25E−09 | >10 | 7.037 |
| 14511 | | | | | | | |
| ADI- | 73 | 1.67E−08 | 2.67E−09 | 2.13E−09 | 5.87E−10 | >10 | >10 |
| 14512 | | | | | | | |
| ADI- | 74 | 3.86E−09 | 1.21E−09 | 4.42E−09 | 9.62E−10 | 4.807 | 2.201 |
| 14513 | | | | | | | |
| ADI- | 75 | 3.83E−10 | NB | 6.82E−10 | NB | 0.046 | 0.074 |
| 14514 | | | | | | | |
| ADI- | 76 | 5.21E−10 | NB | 1.10E−09 | NB | 0.051 | 0.049 |
| 14515 | | | | | | | |
| ADI- | 77 | 3.36E−10 | NB | 6.02E−10 | NB | 0.018 | 0.047 |
| 14516 | | | | | | | |
| ADI- | 78 | 2.83E−10 | NB | 4.97E−10 | NB | 0.019 | 0.032 |
| 14518 | | | | | | | |
| ADI- | 79 | 3.76E−09 | NB | 3.85E−09 | NB | 12.230 | 3.426 |
| 14519 | | | | | | | |
| ADI- | 80 | 1.26E−10 | NB | 2.40E−10 | NB | 0.029 | 0.045 |
| 14520 | | | | | | | |
| ADI- | 81 | 4.61E−10 | NB | 9.27E−10 | NB | 0.083 | 0.123 |
| 14521 | | | | | | | |
| ADI- | 82 | NB | 1.49E−09 | NB | 1.06E−09 | 3.528 | 7.285 |
| 14522 | | | | | | | |
| ADI- | 83 | 1.36E−10 | 1.92E−10 | 1.98E−10 | 1.31E−10 | 0.239 | 0.151 |
| 14523 | | | | | | | |
| ADI- | 84 | NB | 8.26E−10 | NB | 7.71E−10 | 6.046 | 6.000 |
| 14524 | | | | | | | |
| ADI- | 85 | 1.79E−10 | 2.30E−10 | 2.32E−10 | 1.49E−10 | 0.135 | 0.108 |
| 14525 | | | | | | | |
| ADI- | 86 | 2.57E−09 | 3.46E−10 | 1.67E−09 | 3.42E−10 | 2.361 | 9.672 |
| 14526 | | | | | | | |
| ADI- | 87 | 4.65E−09 | 8.89E−10 | 2.84E−09 | 6.45E−10 | >10 | >10 |
| 14527 | | | | | | | |
| ADI- | 88 | 1.60E−07 | 3.52E−08 | 9.07E−08 | | >10 | 0.705 |
| 14528 | | | | | | | |
| ADI- | 89 | 1.16E−09 | 1.71E−09 | 1.21E−09 | 7.98E−10 | 2.382 | 0.991 |
| 14529 | | | | | | | |
| ADI- | 90 | 1.90E−07 | 4.72E−08 | 8.83E−08 | 3.76E−08 | >10 | >10 |
| 14530 | | | | | | | |
| ADI- | 91 | 6.64E−08 | 1.26E−08 | 5.37E−08 | 2.38E−08 | >10 | >10 |
| 14531 | | | | | | | |
| ADI- | 92 | 1.48E−10 | 2.24E−10 | 2.10E−10 | 1.36E−10 | 0.168 | 0.208 |
| 14532 | | | | | | | |
| ADI- | 93 | 5.38E−09 | NB | 2.31E−09 | NB | >10 | 0.442 |
| 14533 | | | | | | | |
| ADI- | 94 | 1.63E−08 | 1.00E−09 | 5.05E−09 | 9.30E−10 | >10 | >10 |
| 14534 | | | | | | | |
| ADI- | 95 | 3.21E−09 | 2.30E−10 | 1.81E−09 | 2.38E−10 | >10 | >10 |
| 14535 | | | | | | | |
| ADI- | 96 | 6.20E−10 | 4.04E−10 | 8.49E−10 | 3.82E−10 | 0.560 | 0.696 |
| 14536 | | | | | | | |
| ADI- | 97 | 3.00E−10 | 2.11E−10 | 2.93E−10 | 1.42E−10 | 0.272 | 0.292 |
| 14537 | | | | | | | |
| ADI- | 98 | 4.41E−09 | 3.50E−10 | 2.12E−09 | 1.54E−10 | >10 | >10 |
| 14538 | | | | | | | |
| ADI- | 99 | 2.16E−09 | 7.38E−10 | 5.09E−09 | 5.71E−09 | 0.727 | 0.302 |
| 14539 | | | | | | | |
| ADI- | 100 | 9.23E−09 | NB | 2.31E−09 | NB | >10 | >10 |
| 14540 | | | | | | | |
| ADI- | 101 | 3.23E−10 | NB | 5.32E−10 | NB | 0.023 | 0.106 |
| 14541 | | | | | | | |
| ADI- | 102 | 2.78E−09 | NB | 2.64E−08 | NB | 0.008 | 4.299 |
| 14542 | | | | | | | |
| ADI- | 103 | NB | NB | NB | NB | >10 | >10 |
| 14543 | | | | | | | |
| ADI- | 104 | 4.28E−10 | NB | 2.24E−08 | NB | >10 | >10 |
| 14544 | | | | | | | |
| ADI- | 105 | 1.43E−09 | NB | 3.63E−09 | NB | 0.036 | 0.073 |
| 14545 | | | | | | | |
| ADI- | 106 | 3.74E−09 | 5.89E−10 | 1.83E−09 | 4.72E−10 | >10 | >10 |
| 14546 | | | | | | | |
| ADI- | 107 | 2.11E−10 | 1.69E−10 | 2.82E−10 | 2.69E−10 | 0.198 | 0.252 |
| 14547 | | | | | | | |
| ADI- | 108 | 3.31E−10 | NB | 5.02E−10 | NB | 0.034 | 0.094 |
| 14548 | | | | | | | |
| ADI- | 109 | 2.70E−09 | 3.26E−10 | 3.29E−09 | 2.49E−09 | >10 | >10 |
| 14549 | | | | | | | |
| ADI- | 110 | 1.04E−08 | NB | 3.60E−09 | NB | 2.615 | >10 |
| 14550 | | | | | | | |
| ADI- | 111 | 1.56E−09 | 2.07E−10 | 1.15E−09 | 1.95E−10 | | |
| 14551 | | | | | | | |
| ADI- | 112 | 9.99E−09 | 1.27E−09 | 3.62E−09 | 1.11E−09 | >10 | >10 |
| 14552 | | | | | | | |
| ADI- | 113 | NB | 6.71E−08 | NB | 1.17E−07 | >10 | >10 |
| 14553 | | | | | | | |
| ADI- | 114 | | 3.88E−10 | 3.90E−10 | 1.97E−10 | 0.736 | 0.787 |
| 14554 | | | | | | | |
| ADI- | 115 | NB | NB | 1.58E−08 | NB | >10 | >10 |
| 14555 | | | | | | | |
| ADI- | 116 | NB | NB | | NB | >10 | >10 |
| 14556 | | | | | | | |
| ADI- | 117 | 3.14E−08 | NB | NB | NB | >10 | >10 |
| 14557 | | | | | | | |
| ADI- | 118 | NB | NB | 2.91E−08 | NB | >10 | >10 |
| 14558 | | | | | | | |
| ADI- | 119 | 5.38E−10 | 2.04E−10 | 3.69E−10 | 1.29E−10 | 0.057 | 0.031 |
| 14559 | | | | | | | |
| ADI- | 120 | NB | 8.74E−10 | 1.14E−08 | 3.29E−10 | >10 | >10 |
| 14560 | | | | | | | |
| ADI- | 121 | 1.50E−08 | 3.09E−09 | 7.94E−09 | 2.28E−09 | >10 | >10 |
| 14561 | | | | | | | |
| ADI- | 122 | 4.53E−09 | NB | 1.39E−08 | NB | >10 | 10.470 |
| 14562 | | | | | | | |
| ADI- | 123 | NB | NB | | NB | >10 | >10 |
| 14563 | | | | | | | |

*NN; non-neutralizing, NB; non-binding, ND; not determined. IgG KDs were calculated for antibodies with BLI binding responses >0.1 nm. Antibodies with BLI binding responses <0.05 nm were designated as NB.

TABLE 4
Bin, patch, and antigenic site assignments for anti-RSV antibodies

| | Antibody | | | Antigenic |
|---|---|---|---|---|
| | number | Rin | Patch | Site |
| Name | (Ab #) | Assignment | Assignment | Assignment |
| ADI-14438 | 1 | Mota | | |
| ADI-14439 | 2 | Unknown | | |
| ADI-14440 | 3 | Unknown | | |
| ADI-14441 | 4 | MPE8 | | |
| ADI-14442 | 5 | Mota/MPE8 | 4, 2 | V |
| ADI-14443 | 6 | 14443 | 9 | IV |
| ADI-14444 | 7 | D25 | | |
| ADI-14445 | 8 | Unknown | | |
| ADI-14446 | 9 | 14443 | 9 | IV |
| ADI-14447 | 10 | Mota | 5 | II |
| ADI-14448 | 11 | Mota/MPE8 | | III |
| ADI-14449 | 12 | 14443 | 9 | IV |
| ADI-14450 | 13 | 14443 | 9 | IV |
| ADI-14451 | 14 | MPE8 | 4 | V |
| ADI-14452 | 15 | 14443 | 9 | IV |
| ADI-14453 | 16 | 14469 | 8 | I |
| ADI-14454 | 17 | 14469 | 8 | I |
| ADI-14455 | 18 | D25/mota/MPE8 | | |
| ADI-14456 | 19 | 101F | | |
| ADI-14457 | 20 | 14469 | 8 | I |
| ADI-14458 | 21 | 14443 | 9 | IV |
| ADI-14459 | 22 | 14443 | 9 | IV |
| ADI-14460 | 23 | 14443 | 9 | IV |
| ADI-14461 | 24 | 14443 | 9 | IV |
| ADI-14462 | 25 | 101F | | |
| ADI-14463 | 26 | D25/mota/MPE8 | 4 | V |
| ADI-14464 | 27 | 101F | | |
| ADI-14465 | 28 | 101F | 9 | IV |
| ADI-14466 | 29 | Mota | 5 | II |
| ADI-14467 | 30 | D25/mota/MPE8 | 4, 2 | V |
| ADI-14468 | 31 | 14469 | | I |
| ADI-14469 | 32 | 14469 | 8 | I |
| ADI-14470 | 33 | 14469 | | I |
| ADI-14471 | 34 | 14443 | 9 | IV |
| ADI-14473 | 35 | Mota | 5 | II |
| ADI-14474 | 36 | D25/mota/MPE8 | 4, 2 | V |
| ADI-14475 | 37 | 14469 | 8 | I |
| ADI-14476 | 38 | 13390 | | I |
| ADI-14477 | 39 | 13390 | 8 | I |
| ADI-14478 | 40 | Mota/MPE8 | | III |
| ADI-14479 | 41 | Mota | | |
| ADI-14480 | 42 | MPE8 | | |
| ADI-14482 | 43 | 14443 | 9 | IV |
| ADI-14483 | 44 | Mota/MPE8 | | III |
| ADI-14484 | 45 | 14469 | 8 | I |
| ADI-14485 | 46 | Unknown | | |
| ADI-14486 | 47 | 101F | | |
| ADI-14487 | 48 | Mota | | |
| ADI-14488 | 49 | Unknown | | |
| ADI-14489 | 50 | Mota/MPE8 | 4, 2 | V |
| ADI-14490 | 51 | D25/mota/MPE8 | | |
| ADI-14491 | 52 | 14443 | 9 | IV |
| ADI-14492 | 53 | 14443 | 9 | IV |
| ADI-14493 | 54 | 14443 | 9 | IV |
| ADI-14494 | 55 | 14443 | 9 | IV |
| ADI-14495 | 56 | Unknown | | I |
| ADI-14496 | 57 | D25 | 1 | Ø |
| ADI-14497 | 58 | 14469 | 8 | I |
| ADI-14498 | 59 | 14469 | 8 | I |
| ADI-14499 | 60 | 13390 | 8 | I |
| ADI-14500 | 61 | 14443 | 9 | IV |
| ADI-14501 | 62 | MPE8 | | |
| ADI-14502 | 63 | AM14 | | |
| ADI-14503 | 64 | 14443 | 9 | IV |
| ADI-14504 | 65 | Mota | | |
| ADI-14505 | 66 | 14443 | 9 | IV |
| ADI-14506 | 67 | Unknown | | |
| ADI-14507 | 68 | 14469 | | I |
| ADI-14508 | 69 | MPE8 | 4 | V |
| ADI-14509 | 70 | Mota/MPE8 | 4 | V |
| ADI-14510 | 71 | Unknown | | |
| ADI-14511 | 72 | Unknown | | |
| ADI-14512 | 73 | Unknown | | |
| ADI-14513 | 74 | Unknown | | |
| ADI-14514 | 75 | Mota/MPE8 | 4 | V |
| ADI-14515 | 76 | Mota/MPE8 | | V |
| ADI-14516 | 77 | D25/mota/MPE8 | 4 | V |
| ADI-14518 | 78 | Mota/MPE8 | 4 | V |
| ADI-14519 | 79 | 101F | | |
| ADI-14520 | 80 | 14443 | 9 | IV |
| ADI-14521 | 81 | D25/mota/MPE8 | 4 | V |
| ADI-14522 | 82 | Unknown | | |
| ADI-14523 | 83 | 14443 | 9 | IV |
| ADI-14524 | 84 | Unknown | | |
| ADI-14525 | 85 | 14443 | 9 | IV |
| ADI-14526 | 86 | Unknown | | |
| ADI-14527 | 87 | Unknown | | |
| ADI-14528 | 88 | Unknown | | |
| ADI-14529 | 89 | 101F | 9 | IV |
| ADI-14530 | 90 | Unknown | | |
| ADI-14531 | 91 | Unknown | | |
| ADI-14532 | 92 | 14443 | 9 | IV |
| ADI-14533 | 93 | Unknown | | |
| ADI-14534 | 94 | Unknown | | |
| ADI-14535 | 95 | Unknown | | |
| ADI-14536 | 96 | Mota | 5 | II |
| ADI-14537 | 97 | 14443 | 9 | IV |
| ADI-14538 | 98 | Mota | | |
| ADI-14539 | 99 | Mota | | |
| ADI-14540 | 100 | Unknown | | |
| ADI-14541 | 101 | MPE8 | | III |
| ADI-14542 | 102 | D25 | | |
| ADI-14543 | 103 | Unknown | | |
| ADI-14544 | 104 | D25 | 1 | Ø |
| ADI-14545 | 105 | D25 | 1, 2 | Ø |
| ADI-14546 | 106 | Unknown | | |
| ADI-14547 | 107 | 14443 | 9 | IV |
| ADI-14548 | 108 | 14443 | 9 | IV |
| ADI-14549 | 109 | 13390 | | |
| ADI-14550 | 110 | Unknown | | |
| ADI-14551 | 111 | Unknown | 1 | UK |
| ADI-14552 | 112 | Unknown | | |
| ADI-14553 | 113 | Unknown | | |
| ADI-14554 | 114 | 14443 | | |
| ADI-14555 | 115 | Unknown | | |
| ADI-14556 | 116 | Unknown | | |
| ADI-14557 | 117 | 101F | | |
| ADI-14558 | 118 | Unknown | | |
| ADI-14559 | 119 | 14443 | 9 | IV |
| ADI-14560 | 120 | Mota | | |
| ADI-14561 | 121 | Unknown | | |
| ADI-14562 | 122 | AM14 | | |
| ADI-14563 | 123 | Unknown | | |

TABLE 5
A subset of anti-RSV F antibodies cross-neutralize human metapneumovirus.

| | Antibody | | | Prefusion | Postfusion | |
|---|---|---|---|---|---|---|
| | number | HMPV-A1 | RSV-A2 IC₅₀ | RSV F K_{D} | RSV F K_{D} | RSV F |
| Name | (Ab #) | IC₅₀ (μg/ml) | (μg/ml) | (M) | (M) | Binding Site |
| ADI- | 11 | 0.05 | 0.04 | 3.8 × 10⁻¹⁰ | N.B. | III |
| 14448 | | | | | | |
| ADI- | 4 | 37.8 | >25 | 8.6 × 10⁻⁹ | N.B. | III* |
| 14441 | | | | | | |
| ADI- | 62 | 31.4 | 12.4 | 1.6 × 10⁻⁸ | N.B. | III* |
| 14501 | | | | | | |
| MPE8 | N/A | 0.07 | 0.04 | — | — | — |
| Control | | | | | | |

N.B., non-binder;
N/A, not applicable
*Binding site assignment based on competition only.

### Materials and Methods

### Study Design

[0221] To profile the antibody response to RSV F, peripheral blood mononuclear cells were obtained from an adult donor approximately between 20-35 years of age, and monoclonal antibodies from RSV F-reactive B cells were isolated therefrom. The antibodies were characterized by sequencing, binding, epitope mapping, and neutralization assays. All samples for this study were collected with informed consent of volunteers. This study was unblinded and not randomized. At least two independent experiments were performed for each assay.

### Generation of RSV F Sorting Probes

[0222] The soluble prefusion and postfusion probes were based on the RSV F ΔFP and DS-Cav1 constructs that we previously crystallized and determined to be in the pre- and postfusion conformations, respectively (11, 15). To increase the avidity of the probes and to uniformly orient the RSV F proteins, the trimeric RSV F proteins were coupled to tetrameric streptavidin through biotinylation of a C-terminal AviTag. For each probe, both a C-terminal His-Avi tagged version and a C-terminal StrepTagII version were co-transfected into FreeStyle 293-F cells. The secreted proteins were purified first over Ni-NTA resin to remove trimers lacking the His-Avi tag. The elution from the Ni-NTA purification was then purified over Strep-Tactin resin. Due to the low avidity of a single StrepTagII for the Strep-Tactin resin, additional washing steps were able to remove singly StrepTagged trimers. This resulted in the purification of trimers containing two StrepTagII tagged monomers and therefore only one His-Avi tagged monomer. This purification scheme results in a single AviTag per trimer which greatly reduces the aggregation or ‘daisy-chaining’ that occurs when trimeric proteins containing three AviTags are incubated with tetrameric streptavidin. RSV F trimers were biotinylated using biotin ligase BirA according to the manufacturer's instructions (Avidity, LLC). Biotinylated proteins were separated from excess biotin by size-exclusion chromatography on a Superdex 200 column (GE Healthcare). Quantification of the number of biotin moieties per RSV F trimer was performed using the Quant*Tag Biotin Kit per the manufacturer's instructions (Vector Laboratories).

### Single B-Cell Sorting

[0223] Peripheral blood mononuclear cells were stained using anti-human IgG (BV605), IgA (FITC), CD27 (BV421), CD8 (PerCP-Cy5.5), CD14 (PerCP-Cy5.5), CD19 (PECy7), CD20 (PECy7) and a mixture of dual-labeled DS-Cav1 and F ΔFP tetramers (50 nM each). Dual-labeled RSV F tetramers were generated by incubating the individual AviTagged RSV F proteins with premium-grade phycoerythrin-labeled streptavidin (Molecular Probes) or premium-grade allophycocyanin-labeled streptavidin for at least 20 minutes on ice at a molar ratio of 4:1. Tetramers were prepared fresh for each experiment. Single cells were sorted on a BD fluorescence-activated cell sorter Aria II into 96-well PCR plates (BioRad) containing 20 μL/well of lysis buffer [5 μL of 5× first strand cDNA buffer (Invitrogen), 0.25 μL RNaseOUT (Invitrogen), 1.25 μL dithiothreitol (Invitrogen), 0.625 μL NP-40 (New England Biolabs), and 12.6 μL dH₂O]. Plates were immediately frozen on dry ice before storage at −80° C.

### Amplification and Cloning of Antibody Variable Genes

[0224] Single B cell PCR was performed as described previously (22). Briefly, IgH, Igλ and Igκ variable genes were amplified by RT-PCR and nested PCR reactions using cocktails of IgG and IgA-specific primers (22). The primers used in the second round of PCR contained 40 base pairs of 5′ and 3′ homology to the cut expression vectors to allow for cloning by homologous recombination into Saccharomyces cerevisiae (40). PCR products were cloned into S. cerevisiae using the lithium acetate method for chemical transformation (41). Each transformation reaction contained 20 μL of unpurified heavy chain and light chain PCR product and 200 ng of cut heavy and light chain plasmids. Following transformation, individual yeast colonies were picked for sequencing and characterization.

### Expression and Purification of IgGs and Fab Fragments

[0225] Anti-RSV F IgGs were expressed in S. cerevisiae cultures grown in 24-well plates, as described previously (23). Fab fragments used for competition assays were generated by digesting the IgGs with papain for 2 hours at 30° C. The digestion was terminated by the addition of iodoacetamide, and the Fab and Fc mixtures were passed over Protein A agarose to remove Fc fragments and undigested IgG. The flowthrough of the Protein A resin was then passed over CaptureSelect™ IgG-CH1 affinity resin (ThermoFischer Scientific), and eluted with 200 mM acetic acid/50 mM NaCl pH 3.5 into ⅛th volume 2M Hepes pH 8.0. Fab fragments then were buffer-exchanged into PBS pH 7.0.

### Biolayer Interferometry Binding Analysis

[0226] IgG binding to DS-Cav1 and FΔ FP was determined by BLI measurements using a ForteBio Octet HTX instrument (Pall Life Sciences). For high-throughput K_{D} screening, IgGs were immobilized on AHQ sensors (Pall Life Sciences) and exposed to 100 nM antigen in PBS containing 0.1% BSA (PBSF) for an association step, followed by a dissociation step in PBSF buffer. Data was analyzed using the ForteBio Data Analysis Software 7. The data was fit to a 1:1 binding model to calculate an association and dissociation rate, and K_{D} was calculated using the ratio k_{d}/kₐ.

### Antibody Competition Assays

[0227] Antibody competition assays were performed as previously described (23). Antibody competition was measured by the ability of a control anti-RSV F Fab to inhibit binding of yeast surface-expressed anti-RSV F IgGs to either DS-Cav1 or FΔ FP. 50 nM biotinylated DS-Cav1 or FΔ FP was pre-incubated with 1 μM competitor Fab for 30 min at room temperature and then added to a suspension of yeast expressing anti-RSV F IgG. Unbound antigen was removed by washing with PBS containing 0.1% BSA (PB SF). After washing, bound antigen was detected using streptavidin Alexa Fluor 633 at a 1:500 dilution (Life Technologies) and analyzed by flow cytometry using a FACSCanto II (BD Biosciences). The level of competition was assessed by measuring the fold reduction in antigen binding in the presence of competitor Fab relative to an antigen-only control. Antibodies were considered competitors when a greater than five-fold reduction was observed in the presence of control Fab relative to an antigen-only control.

Expression, Purification and Biotinylation of preF Patch Variants

[0228] A panel of 9 patches of 2-4 mutations uniformly covering the surface of the preF molecule was designed based on the structure of prefusion RSV F (10). For known antigenic sites, including those recognized by motavizumab, 101F, D25, AM14 and MPE8, patches incorporated residues associated with viral escape or known to be critical for antibody binding. Residues with high conservation across 184 subtype A, subtype B and bovine RSV F sequences were avoided where possible to minimize the likelihood of disrupting protein structure. The mutations present in each patch variant are shown in FIG. 7A. Mutations for each patch variant were cloned into the prefusion stabilized RSV F (DS-Cav1) construct with a C-terminal AviTag for site specific biotinylation. Proteins were secreted from FreeStyle 293-F cells, purified over Ni-NTA resin and biotinylated using biotin ligase BirA according to the manufacturer's instructions (Avidity, LLC). Biotinylated proteins were separated from excess biotin by size-exclusion chromatography on a Superdex 200 column (GE Healthcare). A deglycosylated version of DS-Cav1 was produced by expressing DS-Cav1 in the presence of 1 μM kifunensine and digesting with 10% (wt/wt) EndoH before biotinylation.

### Luminex Assay for Patch Variant Binding

[0229] Binding of isolated antibodies to the patch variants was determined using a high-throughput Luminex assay. Each biotinylated variant and a DS-Cav1 control were coupled to avidin coated MagPlex beads (Bio-Rad), each with a bead identification number reflecting a unique ratio of red and infrared dyes embedded within the bead. The coupled beads were then mixed with a six-fold serial dilution of each antibody, ranging from 400 nM to 1.4 pM, in a 384-well plate. Beads were washed using a magnetic microplate washer (BioTek) before incubation with a PE conjugated mouse anti-human IgG Fc secondary antibody (Southern Biotech). Beads were classified and binding of PE was measured using a FLEXMAP 3D flow cytometer (Luminex).

### RSV Neutralization Assays

[0230] Viral stocks were prepared and maintained as previously described (61). Recombinant mKate-RSV expressing prototypic subtype A (strain A2) and subtype B (18537) F genes and the Katushka fluorescent protein were constructed as reported by Hotard et al. (62). HEp-2 cells were maintained in Eagle's minimal essential medium containing 10% fetal bovine serum supplemented with glutamine, penicillin and streptomycin. Antibody neutralization was measured by a fluorescence plate reader neutralization assay (15). A 30 μL solution of culture media containing 2.4×10⁴ HEp-2 cells was seeded in 384-well black optical bottom plate (Nunc, Thermo Scientific). IgG samples were serially diluted four-fold from 1:10 to 1:163840 and an equal volume of recombinant mKate-RSV A2 was added. Samples were mixed and incubated at 37° C. for one hour. After incubation, 50 μL mixture of sample and virus was added to cells in 384-well plate, and incubated at 37° C. for 22-24 hours. The assay plate was then measured for fluorescence intensity in a microplate reader at Ex 588 nm and Em 635 nm (SpectraMax Paradigm, molecular devices). IC₅₀ of neutralization for each sample was calculated by curve fitting using Prism (GraphPad Software Inc.).

### Human Metapneumovirus Neutralization Assays

[0231] Predetermined amounts of GFP-expressing hMPV recombinant virus (NL/1/00, A1 sublineage, a kind gift of Bernadette van den Hoogen and Ron Fouchier, Rotterdam, the Netherlands) were mixed with serial dilutions of monoclonal antibodies before being added to cultures of Vero-118 cells growing in 96-well plates with Dulbecco's Modified Eagle's medium supplemented with 10% fetal calf serum. Thirty-six hours later, the medium was removed, PBS was added and the amount of GFP per well was measured with a Tecan microplate reader M200. Fluorescence values were represented as percent of a virus control without antibody.

### Polyreactivity Assay

[0232] Antibody polyreactivity was assessed using a previously described high-throughput assay that measures binding to solubilized CHO cell membrane preparations (SMPs) (43). Briefly, two million IgG-presenting yeast were transferred into a 96-well assay plate and pelleted to remove the supernatant. The pellet was resuspended in 50 μL of 1:10 diluted stock b-SMPs and incubated on ice for 20 minutes. Cells were then washed twice with ice-cold PBSF and the cell pellet was re-suspended in 50 μL of secondary labeling mix (Extravidin-R-PE, anti-human LCFITC, and propidium iodide). The mix was incubated on ice for 20 minutes followed by two washes with ice-cold PBSF. Cells were then re-suspended in 100 μL of ice-cold PB SF, and the plate was run on a FACSCanto II (BD Biosciences) using a HTS sample injector. Flow cytometry data was analyzed for mean fluorescence intensity in the R-PE channel and normalized to proper controls in order to assess non-specific binding.

### REFERENCES AND NOTES

[0233] 1. A. L. Rogovik, B. Carleton, A. Solimano, R. D. Goldman, Palivizumab for the prevention of respiratory syncytial virus infection. Can Fam Physician 56, 769-772 (2010).
[0234] 2. B. S. Graham, Biological challenges and technological opportunities for respiratory syncytial virus vaccine development. Immunol Rev 239, 149-166 (2011).
[0235] 3. J. R. Groothuis, E. A. Simoes, V. G. Hemming, Respiratory syncytial virus (RSV) infection in preterm infants and the protective effects of RSV immune globulin (RSVIG). Respiratory Syncytial Virus Immune Globulin Study Group. Pediatrics 95, 463-467 (1995).
[0236] 4. M. Magro, V. Mas, K. Chappell, M. Vazquez, O. Cano, D. Luque, M. C. Terron, J. A. Melero, C. Palomo, Neutralizing antibodies against the preactive form of respiratory syncytial virus fusion protein offer unique possibilities for clinical intervention. Proc Natl Acad Sci USA 109, 3089-3094 (2012).
[0237] 5. S. Johnson, C. Oliver, G. A. Prince, V. G. Hemming, D. S. Pfarr, S. C. Wang, M. Dormitzer, J. O'Grady, S. Koenig, J. K. Tamura, R. Woods, G. Bansal, D. Couchenour, E. Tsao, W. C. Hall, J. F. Young, Development of a humanized monoclonal antibody (MEDI-493) with potent in vitro and in vivo activity against respiratory syncytial virus. J Infect Dis 176, 1215-1224 (1997).
[0238] 6. J. A. Beeler, K. van Wyke Coelingh, Neutralization epitopes of the F glycoprotein of respiratory syncytial virus: effect of mutation upon fusion function. J Virol 63, 2941-2950 (1989).
[0239] 7. R. A. Karron, D. A. Buonagurio, A. F. Georgiu, S. S. Whitehead, J. E. Adamus, M. L. Clements-Mann, D. O. Harris, V. B. Randolph, S. A. Udem, B. R. Murphy, M. S. Sidhu, Respiratory syncytial virus (RSV) SH and G proteins are not essential for viral replication in vitro: clinical evaluation and molecular characterization of a cold-passaged, attenuated RSV subgroup B mutant. Proc Natl Acad Sci USA 94, 13961-13966 (1997).
[0240] 8. J. O. Ngwuta, M. Chen, K. Modjarrad, M. G. Joyce, M. Kanekiyo, A. Kumar, H. M. Yassine, S. M. Moin, A. M. Killikelly, G. Y. Chuang, A. Druz, I. S. Georgiev, E. J. Rundlet, M. Sastry, G. B. Stewart-Jones, Y. Yang, B. Zhang, M. C. Nason, C. Capella, M. E. Peeples, J. E. Ledgerwood, J. S. McLellan, P. D. Kwong, B. S. Graham, Prefusion F-specific antibodies determine the magnitude of RSV neutralizing activity in human sera. Sci Transl Med 7, 309ra162 (2015).
[0241] 9. T. I.-R. S. Group, Palivizumab, a humanized respiratory syncytial virus monoclonal antibody, reduces hospitalization from respiratory syncytial virus infection in high-risk infants. Pediatrics 102, 531-537 (1998).
[0242] 10. J. S. McLellan, M. Chen, S. Leung, K. W. Graepel, X. Du, Y. Yang, T. Zhou, U. Baxa, E. Yasuda, T. Beaumont, A. Kumar, K. Modjarrad, Z. Zheng, M. Zhao, N. Xia, P. D. Kwong, B. S. Graham, Structure of RSV fusion glycoprotein trimer bound to a prefusion-specific neutralizing antibody. Science 340, 1113-1117 (2013).
[0243] 11. J. S. McLellan, Y. Yang, B. S. Graham, P. D. Kwong, Structure of respiratory syncytial virus fusion glycoprotein in the postfusion conformation reveals preservation of neutralizing epitopes. J Virol 85, 7788-7796 (2011).
[0244] 12. K. A. Swanson, E. C. Settembre, C. A. Shaw, A. K. Dey, R. Rappuoli, C. W. Mandl, P. R. Dormitzer, A. Carfi, Structural basis for immunization with postfusion respiratory syncytial virus fusion F glycoprotein (RSV F) to elicit high neutralizing antibody titers. Proc Natl Acad Sci USA 108, 9619-9624 (2011).
[0245] 13. L. Liljeroos, M. A. Krzyzaniak, A. Helenius, S. J. Butcher, Architecture of respiratory syncytial virus revealed by electron cryotomography. Proc Natl Acad Sci USA 110, 11133-11138 (2013).
[0246] 14. A. Krarup, D. Truan, P. Furmanova-Hollenstein, L. Bogaert, P. Bouchier, I. J. Bisschop, M. N. Widjojoatmodjo, R. Zahn, H. Schuitemaker, J. S. McLellan, J. P. Langedijk, A highly stable prefusion RSV F vaccine derived from structural analysis of the fusion mechanism. Nat Commun 6, 8143 (2015).
[0247] 15. J. S. McLellan, M. Chen, M. G. Joyce, M. Sastry, G. B. Stewart-Jones, Y. Yang, B. Zhang, L. Chen, S. Srivatsan, A. Zheng, T. Zhou, K. W. Graepel, A. Kumar, S. Moin, J. C. Boyington, G. Y. Chuang, C. Soto, U. Baxa, A. Q. Bakker, H. Spits, T. Beaumont, Z. Zheng, N. Xia, S. Y. Ko, J. P. Todd, S. Rao, B. S. Graham, P. D. Kwong, Structure-based design of a fusion glycoprotein vaccine for respiratory syncytial virus. Science 342, 592-598 (2013).
[0248] 16. M. J. Kwakkenbos, S. A. Diehl, E. Yasuda, A. Q. Bakker, C. M. van Geelen, M. V. Lukens, G. M. van Bleek, M. N. Widjojoatmodjo, W. M. Bogers, H. Mei, A. Radbruch, F. A. Scheeren, H. Spits, T. Beaumont, Generation of stable monoclonal antibody-producing B cell receptor-positive human memory B cells by genetic programming. Nat Med 16, 123-128 (2010).
[0249] 17. D. Corti, S. Bianchi, F. Vanzetta, A. Minola, L. Perez, G. Agatic, B. Guarino, C. Silacci, J. Marcandalli, B. J. Marsland, A. Piralla, E. Percivalle, F. Sallusto, F. Baldanti, A. Lanzavecchia, Cross-neutralization of four paramyxoviruses by a human monoclonal antibody. Nature 501, 439-443 (2013).
[0250] 18. M. Magro, D. Andreu, P. Gomez-Puertas, J. A. Melero, C. Palomo, Neutralization of human respiratory syncytial virus infectivity by antibodies and low-molecular-weight compounds targeted against the fusion glycoprotein. J Virol 84, 7970-7982 (2010).
[0251] 19. G. Taylor, E. J. Stott, J. Furze, J. Ford, P. Sopp, Protective epitopes on the fusion protein of respiratory syncytial virus recognized by murine and bovine monoclonal antibodies. J Gen Virol 73 (Pt 9), 2217-2223 (1992).
[0252] 20. L. J. Calder, L. Gonzalez-Reyes, B. Garcia-Barreno, S. A. Wharton, J. J. Skehel, D. C. Wiley, J. A. Melero, Electron microscopy of the human respiratory syncytial virus fusion protein and complexes that it forms with monoclonal antibodies. Virology 271, 122-131 (2000).
[0253] 21. M. S. Gilman, S. M. Moin, V. Mas, M. Chen, N. K. Patel, K. Kramer, Q. Zhu, S. C. Kabeche, A. Kumar, C. Palomo, T. Beaumont, U. Baxa, N. D. Ulbrandt, J. A. Melero, B. S. Graham, J. S. McLellan, Characterization of a Prefusion-Specific Antibody That Recognizes a Quaternary, Cleavage-Dependent Epitope on the RSV Fusion Glycoprotein. PLoS Pathog 11, e1005035 (2015).
[0254] 22. M. G. Joyce, A. K. Wheatley, P. V. Thomas, G. Y. Chuang, C. Soto, R. T. Bailer, A. Druz, I. S. Georgiev, R. A. Gillespie, M. Kanekiyo, W. P. Kong, K. Leung, S. N. Narpala, M. S. Prabhakaran, E. S. Yang, B. Zhang, Y. Zhang, M. Asokan, J. C. Boyington, T. Bylund, S. Darko, C. R. Lees, A. Ransier, C. H. Shen, L. Wang, J. R. Whittle, X. Wu, H. M. Yassine, C. Santos, Y. Matsuoka, Y. Tsybovsky, U. Baxa, J. C. Mullikin, K. Subbarao, D. C. Douek, B. S. Graham, R. A. Koup, J. E. Ledgerwood, M. Roederer, L. Shapiro, P. D. Kwong, J. R. Mascola, A. B. McDermott, Vaccine-Induced Antibodies that Neutralize Group 1 and Group 2 Influenza A Viruses. Cell 166, 609-623 (2016).
[0255] 23. J. Truck, M. N. Ramasamy, J. D. Galson, R. Rance, J. Parkhill, G. Lunter, A. J. Pollard, D. F. Kelly, Identification of antigen-specific B cell receptor sequences using public repertoire analysis. J Immunol 194, 252-261 (2015).
[0256] 24. P. Parameswaran, Y. Liu, K. M. Roskin, K. K. Jackson, V. P. Dixit, J. Y. Lee, K. L. Artiles, S. Zompi, M. J. Vargas, B. B. Simen, B. Hanczaruk, K. R. McGowan, M. A. Tariq, N. Pourmand, D. Koller, A. Balmaseda, S. D. Boyd, E. Harris, A. Z. Fire, Convergent antibody signatures in human dengue. Cell host & microbe 13, 691-700 (2013).
[0257] 25. K. J. Jackson, Y. Liu, K. M. Roskin, J. Glanville, R. A. Hoh, K. Seo, E. L. Marshall, T. C. Gurley, M. A. Moody, B. F. Haynes, E. B. Walter, H. X. Liao, R. A. Albrecht, A. Garcia-Sastre, J. Chaparro-Riggers, A. Rajpal, J. Pons, B. B. Simen, B. Hanczaruk, C. L. Dekker, J. Laserson, D. Koller, M. M. Davis, A. Z. Fire, S. D. Boyd, Human responses to influenza vaccination show seroconversion signatures and convergent antibody rearrangements. Cell host & microbe 16, 105-114 (2014).
[0258] 26. F. W. Henderson, A. M. Collier, W. A. Clyde, Jr., F. W. Denny, Respiratory-syncytial-virus infections, reinfections and immunity. A prospective, longitudinal study in young children. The New England journal of medicine 300, 530-534 (1979).
[0259] 27. M. A. Moody, B. F. Haynes, Antigen-specific B cell detection reagents: use and quality control. Cytometry A 73, 1086-1092 (2008).
[0260] 28. M. S. Habibi, A. Jozwik, S. Makris, J. Dunning, A. Paras, J. P. DeVincenzo, C. A. de Haan, J. Wrammert, P. J. Openshaw, C. Chiu, I. Mechanisms of Severe Acute Influenza Consortium, Impaired Antibody-mediated Protection and Defective IgA B-Cell Memory in Experimental Infection of Adults with Respiratory Syncytial Virus. Am J Respir Crit Care Med 191, 1040-1049 (2015).
[0261] 29. T. Tiller, E. Meffre, S. Yurasov, M. Tsuiji, M. C. Nussenzweig, H. Wardemann, Efficient generation of monoclonal antibodies from single human B cells by single cell RT-PCR and expression vector cloning. J Immunol Methods 329, 112-124 (2008).
[0262] 30. Z. A. Bornholdt, H. L. Turner, C. D. Murin, W. Li, D. Sok, C. A. Souders, A. E. Piper, A. Goff, J. D. Shamblin, S. E. Wollen, T. R. Sprague, M. L. Fusco, K. B. Pommert, L. A. Cavacini, H. L. Smith, M. Klempner, K. A. Reimann, E. Krauland, T. U. Gerngross, K. D. Wittrup, E. O. Saphire, D. R. Burton, P. J. Glass, A. B. Ward, L. M. Walker, Isolation of potent neutralizing antibodies from a survivor of the 2014 Ebola virus outbreak. Science 351, 1078-1083 (2016).
[0263] 31. J. F. Scheid, H. Mouquet, N. Feldhahn, M. S. Seaman, K. Velinzon, J. Pietzsch, R. G. Ott, R. M. Anthony, H. Zebroski, A. Hurley, A. Phogat, B. Chakrabarti, Y. Li, M. Connors, F. Pereyra, B. D. Walker, H. Wardemann, D. Ho, R. T. Wyatt, J. R. Mascola, J. V. Ravetch, M. C. Nussenzweig, Broad diversity of neutralizing antibodies isolated from memory B cells in HIV-infected individuals. Nature 458, 636-640 (2009).
[0264] 32. J. Wrammert, K. Smith, J. Miller, W. A. Langley, K. Kokko, C. Larsen, N. Y. Zheng, I. Mays, L. Garman, C. Helms, J. James, G. M. Air, J. D. Capra, R. Ahmed, P. C. Wilson, Rapid cloning of high-affinity human monoclonal antibodies against influenza virus. Nature 453, 667-671 (2008).
[0265] 33. S. D. Boyd, B. A. Gaeta, K. J. Jackson, A. Z. Fire, E. L. Marshall, J. D. Merker, J. M. Maniar, L. N. Zhang, B. Sahaf, C. D. Jones, B. B. Simen, B. Hanczaruk, K. D. Nguyen, K. C. Nadeau, M. Egholm, D. B. Miklos, J. L. Zehnder, A. M. Collins, Individual variation in the germline Ig gene repertoire inferred from variable region gene rearrangements. J Immunol 184, 6986-6992 (2010).
[0266] 34. J. Sui, W. C. Hwang, S. Perez, G. Wei, D. Aird, L. M. Chen, E. Santelli, B. Stec, G. Cadwell, M. Ali, H. Wan, A. Murakami, A. Yammanuru, T. Han, N. J. Cox, L. A. Bankston, R. O. Donis, R. C. Liddington, W. A. Marasco, Structural and functional bases for broad-spectrum neutralization of avian and human influenza A viruses. Nat Struct Mol Biol 16, 265-273 (2009).
[0267] 35. C. C. Huang, M. Venturi, S. Majeed, M. J. Moore, S. Phogat, M. Y. Zhang, D. S. Dimitrov, W. A. Hendrickson, J. Robinson, J. Sodroski, R. Wyatt, H. Choe, M. Farzan, P. D. Kwong, Structural basis of tyrosine sulfation and VH-gene usage in antibodies that recognize the HIV type 1 coreceptor-binding site on gp120. Proc Natl Acad Sci USA 101, 2706-2711 (2004).
[0268] 36. C. H. Chan, K. G. Hadlock, S. K. Foung, S. Levy, V(H)1-69 gene is preferentially used by hepatitis C virus-associated B cell lymphomas and by normal B cells responding to the E2 viral antigen. Blood 97, 1023-1026 (2001).
[0269] 37. E. E. Godoy-Lozano, J. Tellez-Sosa, G. Sanchez-Gonzalez, H. Samano-Sanchez, A. Aguilar-Salgado, A. Salinas-Rodriguez, B. Cortina-Ceballos, H. Vivanco-Cid, K. Hernandez-Flores, J. M. Pfaff, K. M. Kahle, B. J. Doranz, R. E. Gomez-Barreto, H. Valdovinos-Torres, I. Lopez-Martinez, M. H. Rodriguez, J. Martinez-Barnetche, Lower IgG somatic hypermutation rates during acute dengue virus infection is compatible with a germinal center-independent B cell response. Genome Med 8, 23 (2016).
[0270] 38. J. Wrammert, D. Koutsonanos, G. M. Li, S. Edupuganti, J. Sui, M. Morrissey, M. McCausland, I. Skountzou, M. Hornig, W. I. Lipkin, A. Mehta, B. Razavi, C. Del Rio, N. Y. Zheng, J. H. Lee, M. Huang, Z. Ali, K. Kaur, S. Andrews, R. R. Amara, Y. Wang, S. R. Das, C. D. O'Donnell, J. W. Yewdell, K. Subbarao, W. A. Marasco, M. J. Mulligan, R. Compans, R. Ahmed, P. C. Wilson, Broadly cross-reactive antibodies dominate the human B cell response against 2009 pandemic H1N1 influenza virus infection. J Exp Med 208, 181-193 (2011).
[0271] 39. S. F. Andrews, Y. Huang, K. Kaur, L. I. Popova, I. Y. Ho, N. T. Pauli, C. J. Henry Dunand, W. M. Taylor, S. Lim, M. Huang, X. Qu, J. H. Lee, M. Salgado-Ferrer, F. Krammer, P. Palese, J. Wrammert, R. Ahmed, P. C. Wilson, Immune history profoundly affects broadly protective B cell responses to influenza. Sci Transl Med 7, 316ra192 (2015).
[0272] 40. M. Liu, G. Yang, K. Wiehe, N. I. Nicely, N. A. Vandergrift, W. Rountree, M. Bonsignori, S. M. Alam, J. Gao, B. F. Haynes, G. Kelsoe, Polyreactivity and autoreactivity among HIV-1 antibodies. J Virol 89, 784-798 (2015).
[0273] 41. H. Mouquet, J. F. Scheid, M. J. Zoller, M. Krogsgaard, R. G. Ott, S. Shukair, M. N. Artyomov, J. Pietzsch, M. Connors, F. Pereyra, B. D. Walker, D. D. Ho, P. C. Wilson, M. S. Seaman, H. N. Eisen, A. K. Chakraborty, T. J. Hope, J. V. Ravetch, H. Wardemann, M. C. Nussenzweig, Polyreactivity increases the apparent affinity of anti-HIV antibodies by heteroligation. Nature 467, 591-595 (2010).
[0274] 42. R. L. Kelly, T. Sun, T. Jain, I. Caffry, Y. Yu, Y. Cao, H. Lynaugh, M. Brown, M. Vasquez, K. D. Wittrup, Y. Xu, High throughput cross-interaction measures for human IgG1 antibodies correlate with clearance rates in mice. MAbs, 0 (2015).
[0275] 43. Y. Xu, W. Roach, T. Sun, T. Jain, B. Prinz, T. Y. Yu, J. Torrey, J. Thomas, P. Bobrowicz, M. Vasquez, K. D. Wittrup, E. Krauland, Addressing polyspecificity of antibodies selected from an in vitro yeast presentation system: a FACS-based, high-throughput selection and analytical tool. Protein Eng Des Sel 26, 663-670 (2013).
[0276] 44. D. R. Bowley, A. F. Labrijn, M. B. Zwick, D. R. Burton, Antigen selection from an HIV-1 immune antibody library displayed on yeast yields many novel antibodies compared to selection from the same library displayed on phage. Protein Eng Des Sel 20, 81-90 (2007).
[0277] 45. H. Wu, D. S. Pfarr, S. Johnson, Y. A. Brewah, R. M. Woods, N. K. Patel, W. I. White, J. F. Young, P. A. Kiener, Development of motavizumab, an ultra-potent antibody for the prevention of respiratory syncytial virus infection in the upper and lower respiratory tract. Journal of molecular biology 368, 652-665 (2007).
[0278] 46. J. S. McLellan, M. Chen, J. S. Chang, Y. Yang, A. Kim, B. S. Graham, P. D. Kwong, Structure of a major antigenic site on the respiratory syncytial virus fusion glycoprotein in complex with neutralizing antibody 101F. J Virol 84, 12236-12244 (2010).
[0279] 47. P. W. Parren, D. R. Burton, The antiviral activity of antibodies in vitro and in vivo. Advances in immunology 77, 195-262 (2001).
[0280] 48. J. Foote, H. N. Eisen, Kinetic and affinity limits on antibodies produced during immune responses. Proc Natl Acad Sci USA 92, 1254-1256 (1995).
[0281] 49. F. D. Batista, M. S. Neuberger, Affinity dependence of the B cell response to antigen: a threshold, a ceiling, and the importance of off-rate. Immunity 8, 751-759 (1998).
[0282] 50. J. E. Schuster, R. G. Cox, A. K. Hastings, K. L. Boyd, J. Wadia, Z. Chen, D. R. Burton, R. A. Williamson, J. V. Williams, A broadly neutralizing human monoclonal antibody exhibits in vivo efficacy against both human metapneumovirus and respiratory syncytial virus. J Infect Dis 211, 216-225 (2015).
[0283] 51. B. F. Fernie, P. J. Cote, Jr., J. L. Gerin, Classification of hybridomas to respiratory syncytial virus glycoproteins. Proceedings of the Society for Experimental Biology and Medicine. Society for Experimental Biology and Medicine (New York, N.Y.) 171, 266-271 (1982).
[0284] 52. P. J. Cote, Jr., B. F. Fernie, E. C. Ford, J. W. Shih, J. L. Gerin, Monoclonal antibodies to respiratory syncytial virus: detection of virus neutralization and other antigen-antibody systems using infected human and murine cells. Journal of virological methods 3, 137-147 (1981).
[0285] 53. E. E. Walsh, J. Hruska, Monoclonal antibodies to respiratory syncytial virus proteins: identification of the fusion protein. J Virol 47, 171-177 (1983).
[0286] 54. L. J. Anderson, P. Bingham, J. C. Hierholzer, Neutralization of respiratory syncytial virus by individual and mixtures of F and G protein monoclonal antibodies. J Virol 62, 4232-4238 (1988).
[0287] 55. G. E. Scopes, P. J. Watt, P. R. Lambden, Identification of a linear epitope on the fusion glycoprotein of respiratory syncytial virus. J Gen Virol 71 (Pt 1), 53-59 (1990).
[0288] 56. J. Arbiza, G. Taylor, J. A. Lopez, J. Furze, S. Wyld, P. Whyte, E. J. Stott, G. Wertz, W. Sullender, M. Trudel, et al., Characterization of two antigenic sites recognized by neutralizing monoclonal antibodies directed against the fusion glycoprotein of human respiratory syncytial virus. J Gen Virol 73 (Pt 9), 2225-2234 (1992).
[0289] 57. J. A. Lopez, R. Bustos, C. Orvell, M. Berois, J. Arbiza, B. Garcia-Barreno, J. A. Melero, Antigenic structure of human respiratory syncytial virus fusion glycoprotein. J Virol 72, 6922-6928 (1998).
[0290] 58. B. J. DeKosky, T. Kojima, A. Rodin, W. Charab, G. C. Ippolito, A. D. Ellington, G. Georgiou, In-depth determination and analysis of the human paired heavy- and light-chain antibody repertoire. Nat Med 21, 86-91 (2015).
[0291] 59. U.S. National Library of Medicine, (NCT02290340, https://clinicaltrials.gov/).
[0292] 60. PATH, RSV Vaccine Snapshot (2016 http://sites.path.org/vaccinedevelopment/files/2016/07/RSV-snapshot-July_13_2016.pdf).
[0293] 61. B. S. Graham, M. D. Perkins, P. F. Wright, D. T. Karzon, Primary respiratory syncytial virus infection in mice. Journal of medical virology 26, 153-162 (1988).
[0294] 62. A. L. Hotard, F. Y. Shaikh, S. Lee, D. Yan, M. N. Teng, R. K. Plemper, J. E. Crowe, Jr., M. L. Moore, A stabilized respiratory syncytial virus reverse genetics system amenable to recombination-mediated mutagenesis. Virology 434, 129-136 (2012).

[0295] An informal sequence listing is provided in Table 6, below. The informal sequence listing provides the following sixteen (16) sequence elements contained in each of the 123 antibodies, identified as described above and designated as Antibody Numbers (Ab #) 1 through 123, in the following order:
[0296] Heavy chain variable region (“HC”) nucleic acid sequence
[0297] Heavy chain variable region (“HC”) amino acid sequence
[0298] Heavy chain variable region CDR H1 (“H1”) amino acid sequence
[0299] Heavy chain variable region CDR H1 (“H1”) nucleic acid sequence
[0300] Heavy chain variable region CDR H2 (“H2”) amino acid sequence
[0301] Heavy chain variable region CDR H2 (“H2”) nucleic acid sequence
[0302] Heavy chain variable region CDR H3 (“H3”) amino acid sequence
[0303] Heavy chain variable region CDR H3 (“H3”) nucleic acid sequence
[0304] Light chain variable region (“LC”) nucleic acid sequence
[0305] Light chain variable region (“LC”) amino acid sequence
[0306] Light chain variable region CDR L1 (“L1”) amino acid sequence
[0307] Light chain variable region CDR L1 (“L1”) nucleic acid sequence
[0308] Light chain variable region CDR L2 (“L2”) amino acid sequence
[0309] Light chain variable region CDR L2 (“L2”) nucleic acid sequence
[0310] Light chain variable region CDR L3 (“L3”) amino acid sequence
[0311] Light chain variable region CDR L3 (“L3”) nucleic acid sequence

TABLE 6
Informal Sequence Listing

| | Seq. | SEQ | |
|---|---|---|---|
| Antibody | Ref. | ID | |
| No. | No. | NO. | Sequence |
| 1 | 1 | 1 | CAGGTCCAGCTTGTACAGTCTGGGGCTGAGGTGAAGAAGCCTGGGGC |
| | | | CTCAGTGAAGGTGTCCTGCAGGGCTTCTGGATTCGTCTTCACCAGTTA |
| | | | TGATATCAACTGGGTGCGACAGGCCCCGGGGCAAGGTCTTGAGTGGA |
| | | | TGGGGCGAATGAACGCTCACACTGGACAGGTGACGTATGCCCAGAAA |
| | | | TTCCAGGACAAAGTCTCCATGACCAGGGACGTCTCCATAACGACAGC |
| | | | CTACCTGGAACTGAGTCGCCTGGCATCTGAGGACACGGCCGTCTATT |
| | | | ACTGTGCGAGGCCCGACATTAACTGGGGTCAAGATGCTTTTGATGTCT |
| | | | GGGGCCAGGGCACAATGGTCACCGTCTCTTCA |
| 1 | 2 | 2 | QVQLVQSGAEVKKPGASVKVSCRASGFVFTSYDINWVRQAPGQGLEW |
| | | | MGRMNAHTGQVTYAQKFQDKVSMTRDVSITTAYLELSRLASEDTAVYY |
| | | | CARPDINWGQDAFDVWGQGTMVTVSS |
| 1 | 3 | 3 | FVFTSYDIN |
| 1 | 4 | 4 | TTCGTCTTCACCAGTTATGATATCAAC |
| 1 | 5 | 5 | RMNAHTGQVTYAQKFQD |
| 1 | 6 | 6 | CGAATGAACGCTCACACTGGACAGGTGACGTATGCCCAGAAATTCCA |
| | | | GGAC |
| 1 | 7 | 7 | ARPDINWGQDAFDV |
| 1 | 8 | 8 | GCGAGGCCCGACATTAACTGGGGTCAAGATGCTTTTGATGTC |
| 1 | 9 | 9 | GACATCCGGATGACCCAGTCTCCTTCCACCCTGTCTGCATCTATAGGA |
| | | | GCCAGAGTCACCATCACTTGCCGGGCCAGTCAGAATATTGGTAACTT |
| | | | CTTGGCCTGGTATCAGCAGAAGCCAGGGAAAGCCCCTAAACTCCTGA |
| | | | TCTATAAGGCGTCTACTTTAGATCCTGGGGTCCCATCAAGGTTCAGCG |
| | | | GCAGCGGATCTGGGACAGAATTCACTCTCACCATCACCAGCCTGCAG |
| | | | CCTGATGATTTCGCAACATTTTACTGCCAACAGTATAAGAGTGACCCC |
| | | | ACTTTTGGCCAGGGGACCAAGGTGGAAATCAAA |
| 1 | 10 | 10 | DIRMTQSPSTLSASIGARVTITCRASQNIGNFLAWYQQKPGKAPKLLIYK |
| | | | ASTLDPGVPSRFSGSGSGTEFTLTITSLQPDDFATFYCQQYKSDPTFGQGT |
| | | | KVEIK |
| 1 | 11 | 11 | RASQNIGNFLA |
| 1 | 12 | 12 | CGGGCCAGTCAGAATATTGGTAACTTCTTGGCC |
| 1 | 13 | 13 | KASTLDP |
| 1 | 14 | 14 | AAGGCGTCTACTTTAGATCCT |
| 1 | 15 | 15 | QQYKSDPT |
| 1 | 16 | 16 | CAACAGTATAAGAGTGACCCCACT |
| 2 | 17 | 17 | CAGGTCCAGCTGGTGCAGTCTGGGGCTGAGGTGAAGAAGCCTGGGTC |
| | | | ATCGGTGAGGGTCTCCTGTAGGGCTTCAGGAGTCACTTTGACCACCGT |
| | | | TGCTGTCAACTGGGTGCGCCAGGTCCCTGGGCAAGGGCCTGAGTGGA |
| | | | TTGGAGGGATCCTCGTTGGGCTTGGTAAGGTCAGACTCGCCCAGAAA |
| | | | TTTGAGAATCGAGCCACTCTAAGGGCGGACACATCTAGCAACACAGC |
| | | | CTACATGGAGTTGAGCGGCCTGAGATTTGAGGACACGGCCGTCTATT |
| | | | ATTGTGCGATAATCGACCCCCAAGATTGTACTGCTGCCAGCTGCTTTT |
| | | | GGGTCAACTGGCTCGACCCCTGGGGCCAGGGAACCCTGGTCACCGTC |
| | | | TCCTCA |
| 2 | 18 | 18 | QVQLVQSGAEVKKPGSSVRVSCRASGVTLTTVAVNWVRQVPGQGPEWI |
| | | | GGILVGLGKVRLAQKFENRATLRADTSSNTAYMELSGLRFEDTAVYYCA |
| | | | IIDPQDCTAASCFWVNWLDPWGQGTLVTVSS |
| 2 | 19 | 19 | VTLTTVAVN |
| 2 | 20 | 20 | GTCACTTTGACCACCGTTGCTGTCAAC |
| 2 | 21 | 21 | GILVGLGKVRLAQKFEN |
| 2 | 22 | 22 | GGGATCCTCGTTGGGCTTGGTAAGGTCAGACTCGCCCAGAAATTTGA |
| | | | GAAT |
| 2 | 23 | 23 | AIIDPQDCTAASCFWVNWLDP |
| 2 | 24 | 24 | GCGATAATCGACCCCCAAGATTGTACTGCTGCCAGCTGCTTTTGGGTC |
| | | | AACTGGCTCGACCCC |
| 2 | 25 | 25 | GAAATTGTATTGACGCAGTCTCCAGGCACCCTGACCTTGTCTCCAGGG |
| | | | GAGACAGCCACCCTCTCCTGCAGGGCCAGTCAGAGTGTTCTTAGTGG |
| | | | CTACTTAGCCTGGTACCAGCAGAAACCTGGCCAGGCTCCCAGGCTCC |
| | | | TCATCTATGCTGCATCCACTAGGGCCACTGACATCCCAGCGAGGTTCA |
| | | | CTGGCAGTGGGTCTGCGACAGACTTCACTCTCACCATCAGCAGACTG |
| | | | GAGCCTCAAGATTTTGCAGTGTATTACTGTCAGCAGTATGGTTCGGCT |
| | | | CCGATCACCTTCGGCCAAGGGACACGACTGGAGATTAAA |
| 2 | 26 | 26 | EIVLTQSPGTLTLSPGETATLSCRASQSVLSGYLAWYQQKPGQAPRLLIY |
| | | | AASTRATDIPARFTGSGSATDFTLTISRLEPQDFAVYYCQQYGSAPITFGQ |
| | | | GTRLEIK |
| 2 | 27 | 27 | RASQSVLSGYLA |
| 2 | 28 | 28 | AGGGCCAGTCAGAGTGTTCTTAGTGGCTACTTAGCC |
| 2 | 29 | 29 | AASTRAT |
| 2 | 30 | 30 | GCTGCATCCACTAGGGCCACT |
| 2 | 31 | 31 | QQYGSAPIT |
| 2 | 32 | 32 | CAGCAGTATGGTTCGGCTCCGATCACC |
| 3 | 33 | 33 | CAGGTCCAGCTGGTGCAGTCTGGGGCTGAGGTAAAGAAGCCTGGGTC |
| | | | ATCGGTGAAGGTCTCCTGCAAGGCCTCTGGAGGCACCATCAACAACG |
| | | | TTGCTATCAGTTGGCTGCGACAGGCCCCTGGACAAGGCCTGGAGTGG |
| | | | CTGGGAGGGAACATCCCTGGCTTTGGTAAAGTCAGATACTCACAGCA |
| | | | GTTTGAGACCAGACTCACTTTAACCGCGGACGTCTCGTCCGACACAG |
| | | | CCTACATGGTGTTGACCAGCCTAAGATCTGAAGACACGGCCGTCTATT |
| | | | ACTGTGCGATCATCGACCCCCAACTTTGCACCAGAGCCAGCTGCTTTT |
| | | | GGGTCAACTGGCTCGACCCCTGGGGCCAGGGGACCACGGTCACCGTC |
| | | | TCCTCA |
| 3 | 34 | 34 | QVQLVQSGAEVKKPGSSVKVSCKASGGTINNVAISWLRQAPGQGLEWL |
| | | | GGNIPGFGKVRYSQQFETRLTLTADVSSDTAYMVLTSLRSEDTAVYYCAI |
| | | | IDPQLCTRASCFWVNWLDPWGQGTTVTVSS |
| 3 | 35 | 35 | GTINNVAIS |
| 3 | 36 | 36 | GGCACCATCAACAACGTTGCTATCAGT |
| 3 | 37 | 37 | GNIPGFGKVRYSQQFET |
| 3 | 38 | 38 | GGGAACATCCCTGGCTTTGGTAAAGTCAGATACTCACAGCAGTTTGA |
| | | | GACC |
| 3 | 39 | 39 | AIIDPQLCTRASCFWVNWLDP |
| 3 | 40 | 40 | GCGATCATCGACCCCCAACTTTGCACCAGAGCCAGCTGCTTTTGGGTC |
| | | | AACTGGCTCGACCCC |
| 3 | 41 | 41 | GATATTGTGATGACTCAGTCTCCAGGCACCCTGTCTGTGTCTCCAGGG |
| | | | GAGAGTGCCGCCCTCTCCTGCGGGGCCAGTGAGAGTATTCTCAGCGA |
| | | | CTCCTTAGCCTGGTACCAGCATAAACCTGGTCAGGCTCCCAGGCTCCT |
| | | | CATCTATGGTGCATCCAGTAGGGCCGCTGGCATCCCAGACAGGTTCA |
| | | | GTGGCAGTGGGTCTGGGACAGACTTCACTCTCACCATCAGCAGACTG |
| | | | GAGCCAGAGGATTTTGCAGTGTATTTCTGTCAACAGTTTGGTGCCTTA |
| | | | CCGATCACTTTCGGCCAAGGGACACGACTGGAGATTAAA |
| 3 | 42 | 42 | DIVMTQSPGTLSVSPGESAALSCGASESILSDSLAWYQHKPGQAPRLLIY |
| | | | GASSRAAGIPDRFSGSGSGTDFTLTISRLEPEDFAVYFCQQFGALPITFGQ |
| | | | GTRLEIK |
| 3 | 43 | 43 | GASESILSDSLA |
| 3 | 44 | 44 | GGGGCCAGTGAGAGTATTCTCAGCGACTCCTTAGCC |
| 3 | 45 | 45 | GASSRAA |
| 3 | 46 | 46 | GGTGCATCCAGTAGGGCCGCT |
| 3 | 47 | 47 | QQFGALPIT |
| 3 | 48 | 48 | CAACAGTTTGGTGCCTTACCGATCACT |
| 4 | 49 | 49 | CAGGTGCAGCTGGTGCAATCTGGGGCTGAGGTGAAGAAGCCGGGGTC |
| | | | CTCGGTGAAAATCTCCTGTAAGGCTTCTGGAGGCACCTTCAACAGTCA |
| | | | AGCAATTCACTGGGTGCGACAGGCCCCTGGACAAGACCTTGAGTGGA |
| | | | TGGGAAACATCATCCCTGGGTTCGGATCACCAAACTCCGCGCAGAAC |
| | | | TTCCAGGGCAGGGTCACCTTCATTGCGGACGATTCCACTGGCGCTGCC |
| | | | TACATGGACTTGAGTAGCCTGAAGTCTGAAGACACGGCCGTCTATTA |
| | | | CTGTGCGACAGCCGGGTGGTTCGGGGAATCAGTTCATTTGGACTCAT |
| | | | GGGGCCAGGGAACCCTGGTCACCGTCTCCTCA |
| 4 | 50 | 50 | QVQLVQSGAEVKKPGSSVKISCKASGGTFNSQAIHWVRQAPGQDLEWM |
| | | | GNIIPGFGSPNSAQNFQGRVTFIADDSTGAAYMDLSSLKSEDTAVYYCAT |
| | | | AGWFGESVHLDSWGQGTLVTVSS |
| 4 | 51 | 51 | GTFNSQAIH |
| 4 | 52 | 52 | GGCACCTTCAACAGTCAAGCAATTCAC |
| 4 | 53 | 53 | NIIPGFGSPNSAQNFQG |
| 4 | 54 | 54 | AACATCATCCCTGGGTTCGGATCACCAAACTCCGCGCAGAACTTCCA |
| | | | GGGC |
| 4 | 55 | 55 | ATAGWFGESVHLDS |
| 4 | 56 | 56 | GCGACAGCCGGGTGGTTCGGGGAATCAGTTCATTTGGACTCA |
| 4 | 57 | 57 | GATATTGTGATGACTCAGTCTCCAGCCACCCTGTCTGTGTCTCCAGGG |
| | | | GAAAGAGCCACCCTCTCCTGCAGGGCCAGTGAGAGTGTTAGCAGCAA |
| | | | CTTAGCCTGGTACCAGCAGAAACCTGGCCAGGCTCCCAGGCTCCTCA |
| | | | TCTATGGTGCATCCACCAGGGCCACTGGTATCCCAGCCAGGTTCAGTG |
| | | | GCAGTGGGTCAGGGACGGAGTTCACTCTCACCATCAACAGCCTGCAG |
| | | | TCTGAAGATTTTGCAGTTTATTACTGTCAGCAGTATAATAACTGGCCT |
| | | | CCTCTCACTTTCGGCGGAGGGACCAAGGTGGAAATCAAA |
| 4 | 58 | 58 | DIVMTQSPATLSVSPGERATLSCRASESVSSNLAWYQQKPGQAPRLLIYG |
| | | | ASTRATGIPARFSGSGSGTEFTLTINSLQSEDFAVYYCQQYNNWPPLTFG |
| | | | GGTKVEIK |
| 4 | 59 | 59 | RASESVSSNLA |
| 4 | 60 | 60 | AGGGCCAGTGAGAGTGTTAGCAGCAACTTAGCC |
| 4 | 61 | 61 | GASTRAT |
| 4 | 62 | 62 | GGTGCATCCACCAGGGCCACT |
| 4 | 63 | 63 | QQYNNWPPLT |
| 4 | 64 | 64 | CAGCAGTATAATAACTGGCCTCCTCTCACT |
| 5 | 65 | 65 | CAGGTCCAGCTGGTACAGTCTGGAAGTGAGGTGAAGAAGCCTGGGGC |
| | | | CTCGGTGAAGGTCTCCTGCAAGGCCTCAGGTTACAGGTTTTCCAACTA |
| | | | TGGTATCAGCTGGGTGCGACAGGCCCCTGGACAAGGCCTAGAGTGGA |
| | | | TGGGATGGATCAGCGCTTACAATGGAAACATAAAGTATGGAAATAAC |
| | | | CTCCAGGGCAGAGTCACCGTGACCACAGACACATCCACGGCCACGGC |
| | | | CTACATGGAGGTGAGGAGCCTGACATCTGACGACACGGCCGTGTATT |
| | | | ACTGTGCGAGAGATGTCCCAGCTGACGGGGTCCACTTCATGGACGTC |
| | | | TGGGGCCAAGGAACCCTGGTCACCGTCTCCTCA |
| 5 | 66 | 66 | QVQLVQSGSEVKKPGASVKVSCKASGYRFSNYGISWVRQAPGQGLEWM |
| | | | GWISAYNGNIKYGNNLQGRVTVTTDTSTATAYMEVRSLTSDDTAVYYC |
| | | | ARDVPADGVHFMDVWGQGTLVTVSS |
| 5 | 67 | 67 | YRFSNYGIS |
| 5 | 68 | 68 | TACAGGTTTTCCAACTATGGTATCAGC |
| 5 | 69 | 69 | WISAYNGNIKYGNNLQG |
| 5 | 70 | 70 | TGGATCAGCGCTTACAATGGAAACATAAAGTATGGAAATAACCTCCA |
| | | | GGGC |
| 5 | 71 | 71 | ARDVPADGVHFMDV |
| 5 | 72 | 72 | GCGAGAGATGTCCCAGCTGACGGGGTCCACTTCATGGACGTC |
| 5 | 73 | 73 | GAAATTGTAATGACACAGTCTCCACTCTCCCTGCCCGTCACCCTTGGA |
| | | | CAGCCGGCCTCCATCTCCTGCAGGTCTAGTCAAAGCCTCGTACACAGT |
| | | | GATACTAACACCTACTTGAACTGGTTTCAGCAGAGGCCAGGCCAATC |
| | | | TCCACGGCGCCTAATTTATAAGGTTTCTAACCGGGACTCTGGGGTCCC |
| | | | AGACAGATTCAGCGGCAGTGGGTCAGGCACTACTTTCACACTGAAAA |
| | | | TCAGCAGGGTGGAGGCTGAGGATGTTGGGATTTATTACTGCATGCAG |
| | | | GGTTCACACTGGGCTCCGACTTTCGGCCAGGGGACCAAGGTGGAAAT |
| | | | CAAA |
| 5 | 74 | 74 | EIVMTQSPLSLPVTLGQPASISCRSSQSLVHSDTNTYLNWFQQRPGQSPRR |
| | | | LIYKVSNRDSGVPDRFSGSGSGTTFTLKISRVEAEDVGIYYCMQGSHWAP |
| | | | TFGQGTKVEIK |
| 5 | 75 | 75 | RSSQSLVHSDTNTYLN |
| 5 | 76 | 76 | AGGTCTAGTCAAAGCCTCGTACACAGTGATACTAACACCTACTTGAAC |
| 5 | 77 | 77 | KVSNRDS |
| 5 | 78 | 78 | AAGGTTTCTAACCGGGACTCT |
| 5 | 79 | 79 | MQGSHWAPT |
| 5 | 80 | 80 | ATGCAGGGTTCACACTGGGCTCCGACT |
| 6 | 81 | 81 | CAGGTCCAGCTGGTGCAGTCTGGGACTGAGGTGAAGAAGCCTGGGTC |
| | | | CTCGGTGAAGGTCTCCTGCAAGGCTTCTGGAGGCACCTTCGGCAGCT |
| | | | ACGCTGTCATCTGGGTGCGACAGGCCCCTGGACAAGGGCTTGAATGG |
| | | | ATGGGACATTTCATCCCTGTGTTTGCTACAACAAACAAGGCACAGAA |
| | | | GTTCCAGGGCAGACTCACCCTTAGTACAGACGAATCTACGGGCACAG |
| | | | TCTACATGGAGCTGAGCAGCCTGAGATCTGAGGACACGGCCGTCTAT |
| | | | TTCTGTGCGACCAAGAGATATTGTAGTGATCCCAGCTGCCATGGACTC |
| | | | TGGTACTTCGATCTCTGGGGCCGTGGCACCCTGGTCACTGTCTCCTCA |
| 6 | 82 | 82 | QVQLVQSGTEVKKPGSSVKVSCKASGGTFGSYAVIWVRQAPGQGLEWM |
| | | | GHFIPVFATTNKAQKFQGRLTLSTDESTGTVYMELSSLRSEDTAVYFCAT |
| | | | KRYCSDPSCHGLWYFDLWGRGTLVTVSS |
| 6 | 83 | 83 | GTFGSYAVI |
| 6 | 84 | 84 | GGCACCTTCGGCAGCTACGCTGTCATC |
| 6 | 85 | 85 | HFIPVFATTNKAQKFQG |
| 6 | 86 | 86 | CATTTCATCCCTGTGTTTGCTACAACAAACAAGGCACAGAAGTTCCAG |
| | | | GGC |
| 6 | 87 | 87 | ATKRYCSDPSCHGLWYFDL |
| 6 | 88 | 88 | GCGACCAAGAGATATTGTAGTGATCCCAGCTGCCATGGACTCTGGTA |
| | | | CTTCGATCTC |
| 6 | 89 | 89 | GACATCCAGTTGACCCAGTCTCCACTCTCCCTGCCCGTCACCCCTGGA |
| | | | GAGCCGGCCTCCATCTCCTGCAGGTCTAGTCAGAGCCTCTTGGATAGT |
| | | | GATGATGGAAACACCTATTTGGACTGGTACCTGCAGAAGCCAGGGCA |
| | | | GTCTCCACAGGTCCTGATCTATATGCTTTCGTATCGGGCCTCTGGAGT |
| | | | CCCAGACAGGTTCAGTGGCAGTGGGTCAGGCACTGATTTCACACTAG |
| | | | AAATCAGCAGGGTGGAGGCTGAGGATGTTGGAGTTTATTACTGCATG |
| | | | CAACGTGTAGAGTTTCCTTACACTTTTGGCCAGGGGACCAAGCTGGA |
| | | | GATCAAA |
| 6 | 90 | 90 | DIQLTQSPLSLPVTPGEPASISCRSSQSLLDSDDGNTYLDWYLQKPGQSPQ |
| | | | VLIYMLSYRASGVPDRFSGSGSGTDFTLEISRVEAEDVGVYYCMQRVEFP |
| | | | YTFGQGTKLEIK |
| 6 | 91 | 91 | RSSQSLLDSDDGNTYLD |
| 6 | 92 | 92 | AGGTCTAGTCAGAGCCTCTTGGATAGTGATGATGGAAACACCTATTT |
| | | | GGAC |
| 6 | 93 | 93 | MLSYRAS |
| 6 | 94 | 94 | ATGCTTTCGTATCGGGCCTCT |
| 6 | 95 | 95 | MQRVEFPYT |
| 6 | 96 | 96 | ATGCAACGTGTAGAGTTTCCTTACACT |
| 7 | 97 | 97 | CAGGTCCAGCTGGTGCAGTCTGGGCCTGACGTGAAGAGACCTGGGGC |
| | | | CTCAGTGAGAGTCTCCTGCAAGGCTTCTGGATACACCTTCAGCGACTA |
| | | | CTATATGCACTGGGTGCGACAGGCCCCTGGACAGGGTCTTGAATGGC |
| | | | TGGCTTGGGTCAACCCTAGCACTGGCGCCACACACTACTCAGAGAGT |
| | | | TTTCGGGGCTCTATGGTCGTTCAAAGGGACACGTCCACCGACACAGC |
| | | | CTACCTGGAGCTGAGTAGTCTGAAATCTGACGACACGGCCGTCTATT |
| | | | ATTGTGCGAGAATCGGGAGTAATGAGATTTGGGGCCAGGGGACAATG |
| | | | GTCACCGTCTCTTCA |
| 7 | 98 | 98 | QVQLVQSGPDVKRPGASVRVSCKASGYTFSDYYMHWVRQAPGQGLEW |
| | | | LAWVNPSTGATHYSESFRGSMVVQRDTSTDTAYLELSSLKSDDTAVYYC |
| | | | ARIGSNEIWGQGTMVTVSS |
| 7 | 99 | 99 | YTFSDYYMH |
| 7 | 100 | 100 | TACACCTTCAGCGACTACTATATGCAC |
| 7 | 101 | 101 | WVNPSTGATHYSESFRG |
| 7 | 102 | 102 | TGGGTCAACCCTAGCACTGGCGCCACACACTACTCAGAGAGTTTTCG |
| | | | GGGC |
| 7 | 103 | 103 | ARIGSNEI |
| 7 | 104 | 104 | GCGAGAATCGGGAGTAATGAGATT |
| 7 | 105 | 105 | CAGTCTGCCCTGACTCAGCCTGCCTCCGTGTCTGGGTCTCCTGGACAG |
| | | | TCGATCACCATCTCCTGCGCTGGCACTTCCAGTGACATTGGTGGTTGG |
| | | | AACTATGTCTCCTGGTACCAACAGTACCCCGGCCAAGTCCCCAAACTC |
| | | | ATCCTTTATGAAGTCACTGATAGGCCCTCAGGGGTTTCTCATCGCTTC |
| | | | TCTGGCTCCAAGTCTGGCAACAGGGCCTTCCTTACCATCACTGGGCTC |
| | | | CGGGCCGAGGACGAGGCTGATTATTACTGCTGCTCATTTACTTCTTCC |
| | | | GGCAGTAGGGTTTTCGGCGGAGGGACCAAGGTCACCGTCCTA |
| 7 | 106 | 106 | QSALTQPASVSGSPGQSITISCAGTSSDIGGWNYVSWYQQYPGQVPKLIL |
| | | | YEVTDRPSGVSHRFSGSKSGNRAFLTITGLRAEDEADYYCCSFTSSGSRV |
| | | | FGGGTKVTVL |
| 7 | 107 | 107 | AGTSSDIGGWNYVS |
| 7 | 108 | 108 | GCTGGCACTTCCAGTGACATTGGTGGTTGGAACTATGTCTCC |
| 7 | 109 | 109 | EVTDRPS |
| 7 | 110 | 110 | GAAGTCACTGATAGGCCCTCA |
| 7 | 111 | 111 | CSFTSSGSRV |
| 7 | 112 | 112 | TGCTCATTTACTTCTTCCGGCAGTAGGGTT |
| 8 | 113 | 113 | GAGGTGCAGCTGTTGGAGTCTGGGGCTGTGATGAAGAGGCCTGGGTC |
| | | | ATCGGTGAGGGTCTCCTGCAGGGCTTCAGGAGTCACTTTGACCACCGT |
| | | | TTCTGTCAACTGGGTGCGCCAGGTCCCTGGGCAAGGGCCTGAGTGGA |
| | | | TTGGAGGGATCCTCATTGGGTTTGGTAAGGTCAGACAAGCCCAGAAA |
| | | | TTTGAGAACCGAGTCACTCTGACCGCGGACGCATCAAGGAACACAGC |
| | | | ATATATGGAGTTGAGCGGACTGACATCTGACGACACGGCCGTCTATT |
| | | | ACTGTGCGATAATCGACCCCCAAGATTGTACTCGTGCCAGCTGCTTTT |
| | | | GGGTCAACTGGCTCGACCCCTGGGGCCAGGGAACCCTGGTCACCGTC |
| | | | TCCTCA |
| 8 | 114 | 114 | EVQLLESGAVMKRPGSSVRVSCRASGVTLTTVSVNWVRQVPGQGPEWI |
| | | | GGILIGFGKVRQAQKFENRVTLTADASRNTAYMELSGLTSDDTAVYYCA |
| | | | IIDPQDCTRASCFWVNWLDPWGQGTLVTVSS |
| 8 | 115 | 115 | VTLTTVSVN |
| 8 | 116 | 116 | GTCACTTTGACCACCGTTTCTGTCAAC |
| 8 | 117 | 117 | GILIGFGKVRQAQKFEN |
| 8 | 118 | 118 | GGGATCCTCATTGGGTTTGGTAAGGTCAGACAAGCCCAGAAATTTGA |
| | | | GAAC |
| 8 | 119 | 119 | AIIDPQDCTRASCFWVNWLDP |
| 8 | 120 | 120 | GCGATAATCGACCCCCAAGATTGTACTCGTGCCAGCTGCTTTTGGGTC |
| | | | AACTGGCTCGACCCC |
| 8 | 121 | 121 | GACATCCGGATGACCCAGTCTCCAGGCACCCTGACCTTGTCCCCAGG |
| | | | GGAGCGAGCCACCCTCTCCTGCAGGGCCAGTCAGAGTATTCTTAGCG |
| | | | GGAACTTAGCCTGGTACCAGCAGAAACCTGGCCAGGCTCCCAGGCTC |
| | | | CTCATCTCTGCTGCATCCACTAGGGCCACTGACATCCCAGACAGGTTC |
| | | | AGTGGCAGTGGGTCTGGGACAGACTTCACTCTCACCATCACCAGACT |
| | | | GGAGCCTCAAGATTTTGCAGTGTATTACTGTCAGCAGTATGATTCGGC |
| | | | TCCGATCACCTTCGGCCAAGGGACACGACTGGAGATTAAA |
| 8 | 122 | 122 | DIRMTQSPGTLTLSPGERATLSCRASQSILSGNLAWYQQKPGQAPRLLISA |
| | | | ASTRATDIPDRFSGSGSGTDFTLTITRLEPQDFAVYYCQQYDSAPITFGQG |
| | | | TRLEIK |
| 8 | 123 | 123 | RASQSILSGNLA |
| 8 | 124 | 124 | AGGGCCAGTCAGAGTATTCTTAGCGGGAACTTAGCC |
| 8 | 125 | 125 | AASTRAT |
| 8 | 126 | 126 | GCTGCATCCACTAGGGCCACT |
| 8 | 127 | 127 | QQYDSAPIT |
| 8 | 128 | 128 | CAGCAGTATGATTCGGCTCCGATCACC |
| 9 | 129 | 129 | CAGGTCCAGCTTGTGCAGTCTGGGGCTGAGGTGAAGAAGCCTGGGTC |
| | | | CTCGGTGAAGGTCTCCTGCGAGGCTTCTGGAGACACCTTCACCAGTTA |
| | | | TGCAGTCATCTGGGTGCGCCAGACCCCAGGACAAGGGCTTGAGTTCA |
| | | | TGGGAAGTATCATCCCTATCTTTCAAACAATAAACTACGCTCCGAAGT |
| | | | TCCAGGGGAGGGTCACCCTAAGCGCGGACGGATCCACGAGCACAGTC |
| | | | TTCATGGAGTTGCGAAACCTGAGATCTGAGGACACGGCCATATATTT |
| | | | CTGTGCGACCAAGAGATATTGTACTAGTCCCAGCTGCCATGGACTCTG |
| | | | GTACTTCAATCTCTGGGGCCGTGGCACAATGGTCACCGTCTCTTCA |
| 9 | 130 | 130 | QVQLVQSGAEVKKPGSSVKVSCEASGDTFTSYAVIWVRQTPGQGLEFM |
| | | | GSIIPIFQTINYAPKFQGRVTLSADGSTSTVFMELRNLRSEDTAIYFCATKR |
| | | | YCTSPSCHGLWYFNLWGRGTMVTVSS |
| 9 | 131 | 131 | DTFTSYAVI |
| 9 | 132 | 132 | GACACCTTCACCAGTTATGCAGTCATC |
| 9 | 133 | 133 | SIIPIFQTINYAPKFQG |
| 9 | 134 | 134 | AGTATCATCCCTATCTTTCAAACAATAAACTACGCTCCGAAGTTCCAG |
| | | | GGG |
| 9 | 135 | 135 | ATKRYCTSPSCHGLWYFNL |
| 9 | 136 | 136 | GCGACCAAGAGATATTGTACTAGTCCCAGCTGCCATGGACTCTGGTA |
| | | | CTTCAATCTC |
| 9 | 137 | 137 | GAAACGACACTCACGCAGTCTCCAATCTCCCTGTCCGTCACCCCTGGA |
| | | | GAGCCGGCCTCCATCTCCTGCAGGTCTAGTAAGAGCCTCTTGGATAGT |
| | | | GATGATGGAAACACTTATTTGGACTGGTACCTGCAGAAGCCAGGGCA |
| | | | GTCTCCACAGATCCTGATCTATATGCTTTCGTATCGGGCCTCTGGAGT |
| | | | CCCAGACAGGTTCAGTGGCAGTGGGTCAGGCACTGATTTCACACTGA |
| | | | AAATCAGCAGGGTGGAGGCTGAGGATGTTGGAGTTTATTACTGCATG |
| | | | CAACGTATAGAGTATCCTTACACTTTTGGCCAGGGGACCAAGGTGGA |
| | | | GATCAAA |
| 9 | 138 | 138 | ETTLTQSPISLSVTPGEPASISCRSSKSLLDSDDGNTYLDWYLQKPGQSPQI |
| | | | LIYMLSYRASGVPDRFSGSGSGTDFTLKISRVEAEDVGVYYCMQRIEYPY |
| | | | TFGQGTKVEIK |
| 9 | 139 | 139 | RSSKSLLDSDDGNTYLD |
| 9 | 140 | 140 | AGGTCTAGTAAGAGCCTCTTGGATAGTGATGATGGAAACACTTATTTG |
| | | | GAC |
| 9 | 141 | 141 | MLSYRAS |
| 9 | 142 | 142 | ATGCTTTCGTATCGGGCCTCT |
| 9 | 143 | 143 | MQRIEYPYT |
| 9 | 144 | 144 | ATGCAACGTATAGAGTATCCTTACACT |
| 10 | 145 | 145 | CAGGTGCAGCTGGTGCAATCTGGGGCTGAGATGAAGAAGCCTGGGTC |
| | | | CTCGGTGACAGTCTCCTGCAAGGCTTCTGGAGTCCCCTTCACCAGTTA |
| | | | TACCTACAGCTGGGTGCGACAGGCCCCTGGACAAGGGCTTGAGTGGA |
| | | | TGGGAAGGGTCCTCCCTGTCATAGGTTCGGCAAAGTACCCACAGAAG |
| | | | TTCCAGGGCACAGTCACCATTACCGCGGACAAATCCACGAGCACAAT |
| | | | ATATTTGCAACTGAGCAGCCTAAGACCTGAAGACACGGCCATTTATTT |
| | | | CTGTGCGGGAAGTCTACTGGCTGGGTACGACAGGGAATTTGACTCCT |
| | | | GGGGCCAGGGAACCCTGGTCACCGTCTCCTCA |
| 10 | 146 | 146 | QVQLVQSGAEMKKPGSSVTVSCKASGVPFTSYTYSWVRQAPGQGLEW |
| | | | MGRVLPVIGSAKYPQKFQGTVTITADKSTSTIYLQLSSLRPEDTAIYFCAG |
| | | | SLLAGYDREFDSWGQGTLVTVSS |
| 10 | 147 | 147 | VPFTSYTYS |
| 10 | 148 | 148 | GTCCCCTTCACCAGTTATACCTACAGC |
| 10 | 149 | 149 | RVLPVIGSAKYPQKFQG |
| 10 | 150 | 150 | AGGGTCCTCCCTGTCATAGGTTCGGCAAAGTACCCACAGAAGTTCCA |
| | | | GGGC |
| 10 | 151 | 151 | AGSLLAGYDREFDS |
| 10 | 152 | 152 | GCGGGAAGTCTACTGGCTGGGTACGACAGGGAATTTGACTCC |
| 10 | 153 | 153 | GACATCCAGATGACCCAGTCTCCATCCTCACTGTCTGCATCTGTGGGA |
| | | | GACAGAATCACCATCACTTGTCGGGCGAGTCAGGGTATTAGCAACTG |
| | | | GTTAGCCTGGTATCAGCAGAAGCCAGGGAAAGCCCCTAAGTCCCTGA |
| | | | TCTATGAAGCATCCACTTTGCAAAGTGGGGTTTCATCAAGGTTCAGCG |
| | | | GCAGTGGATCTGGGACACACTTCACTCTCACCATCGCCAGCCTGCAG |
| | | | CCTGAAGATTTTGCAACTTATTACTGCCAACAGTATTATATTTACCCG |
| | | | CTCACTTTCGGCGGAGGGACCAAGCTGGAGATCAAA |
| 10 | 154 | 154 | DIQMTQSPSSLSASVGDRITITCRASQGISNWLAWYQQKPGKAPKSLIYE |
| | | | ASTLQSGVSSRFSGSGSGTHFTLTIASLQPEDFATYYCQQYYIYPLTFGGG |
| | | | TKLEIK |
| 10 | 155 | 155 | RASQGISNWLA |
| 10 | 156 | 156 | CGGGCGAGTCAGGGTATTAGCAACTGGTTAGCC |
| 10 | 157 | 157 | EASTLQS |
| 10 | 158 | 158 | GAAGCATCCACTTTGCAAAGT |
| 10 | 159 | 159 | QQYYIYPLT |
| 10 | 160 | 160 | CAACAGTATTATATTTACCCGCTCACT |
| 11 | 161 | 161 | GAGGTGCAGCTGGTGGAGTCTGGGGGAGGCTTGGTCAAGCCTGGAGG |
| | | | GTCCCTAAGGCTCTCCTGTGCAGCCTCTGGAAGCTCCTTCCGTTATTC |
| | | | CTACATGAGTTGGGTCCGCCAGGCTCCAGGGAAGGGGCTGCAGTGGG |
| | | | TTGCATCTATTAGTCCTAGTAGCACTTATACAGACTACGCAGACTCTG |
| | | | TGAAGGGCCGAAGCACCATCTCCAGAGACCACGACAAGATCTCTCTG |
| | | | CAAGTGAACAGCCTGAGAGGCGACGACACGGCCGTGTATTATTGTGT |
| | | | GAGACATATGAATTTGGTGATGGGGCCGTTCGCCTTTGATATCTGGGG |
| | | | CCGCGGGACAATGGTCACCGTCTCTTCA |
| 11 | 162 | 162 | EVQLVESGGGLVKPGGSLRLSCAASGSSFRYSYMSWVRQAPGKGLQWV |
| | | | ASISPSSTYTDYADSVKGRSTISRDHDKISLQVNSLRGDDTAVYYCVRHM |
| | | | NLVMGPFAFDIWGRGTMVTVSS |
| 11 | 163 | 163 | SSFRYSYMS |
| 11 | 164 | 164 | AGCTCCTTCCGTTATTCCTACATGAGT |
| 11 | 165 | 165 | SISPSSTYTDYADSVKG |
| 11 | 166 | 166 | TCTATTAGTCCTAGTAGCACTTATACAGACTACGCAGACTCTGTGAAG |
| | | | GGC |
| 11 | 167 | 167 | VRHMNLVMGPFAFDI |
| 11 | 168 | 168 | GTGAGACATATGAATTTGGTGATGGGGCCGTTCGCCTTTGATATC |
| 11 | 169 | 169 | CAGTCTGTCGTGACGCAGCCGCCCTCATTGTCTGGGGCCCCAGGGCA |
| | | | GAGGATCACCATTTCGTGCACTGGGAGCAGCTCCAACATCGGGGCAG |
| | | | GTTATGATGTAAACTGGTACCAGCAGCTTCCAGGAACAGCCCCCAAA |
| | | | CTCCTCATCTATGCTAAGACCAATCGGCCCTCAGGGGTCCCTGAGCGC |
| | | | TTCTCTGGTTCCGAGTCTGGCACCTCCGCCTCCCTGGCCATCACTGGG |
| | | | CTCCAGCCTGAGGATGAGGCTGATTATTACTGCCAGTCATATGACAG |
| | | | GATCGGAATGTATGTCTTCGGAACTGGGACCAAGCTGACCGTCCTA |
| 11 | 170 | 170 | QSVVTQPPSLSGAPGQRITISCTGSSSNIGAGYDVNWYQQLPGTAPKLLIY |
| | | | AKTNRPSGVPERFSGSESGTSASLAITGLQPEDEADYYCQSYDRIGMYVF |
| | | | GTGTKLTVL |
| 11 | 171 | 171 | TGSSSNIGAGYDVN |
| 11 | 172 | 172 | ACTGGGAGCAGCTCCAACATCGGGGCAGGTTATGATGTAAAC |
| 11 | 173 | 173 | AKTNRPS |
| 11 | 174 | 174 | GCTAAGACCAATCGGCCCTCA |
| 11 | 175 | 175 | QSYDRIGMYV |
| 11 | 176 | 176 | CAGTCATATGACAGGATCGGAATGTATGTC |
| 12 | 177 | 177 | GAGGTGCAGCTGGTGGAGTCTGGGGGAGACTTGGTAAAGCCTGGGGG |
| | | | GTCCCTCAGACTCTCATGTGAAGGCTCTGGCTTCATTTTTCCGAACGC |
| | | | CTGGATGAGCTGGGTCCGCCAGGCTCCAGGGAAGGGGCTGGAGTGGG |
| | | | TTGGCCGTATTAAAAGCAACACTGACGGTGGGACAACAGACTACGGT |
| | | | GCACCCGTGAAAGGCAGATTCACCATCTCAAGAGATGATTCAACAAA |
| | | | CACGATGTATCTGCACATGAACAGCCTGAAGACCGAGGACACAGCCG |
| | | | TGTATTTCTGTTCCACAGGCCCACCCTATAAGTATTTTGATGAGACTG |
| | | | GTTATTCGGTCGTTGACTACTGGGGCCAGGGAACCCTGGTCACCGTCT |
| | | | CCTCA |
| 12 | 178 | 178 | EVQLVESGGDLVKPGGSLRLSCEGSGFIFPNAWMSWVRQAPGKGLEWV |
| | | | GRIKSNTDGGTTDYGAPVKGRFTISRDDSTNTMYLHMNSLKTEDTAVYF |
| | | | CSTGPPYKYFDETGYSVVDYWGQGTLVTVSS |
| 12 | 179 | 179 | FIFPNAWMS |
| 12 | 180 | 180 | TTCATTTTTCCGAACGCCTGGATGAGC |
| 12 | 181 | 181 | RIKSNTDGGTTDYGAPVKG |
| 12 | 182 | 182 | CGTATTAAAAGCAACACTGACGGTGGGACAACAGACTACGGTGCACC |
| | | | CGTGAAAGGC |
| 12 | 183 | 183 | STGPPYKYFDETGYSVVDY |
| 12 | 184 | 184 | TCCACAGGCCCACCCTATAAGTATTTTGATGAGACTGGTTATTCGGTC |
| | | | GTTGACTAC |
| 12 | 185 | 185 | TCCTATGAGCTGACACAGCCACCCTCAGCGTCTGGGACCCCCGGGCA |
| | | | GAGGGTCATCATCTCTTGTTCTGGAAGCACGTCCAATTCCGGATATAA |
| | | | TTATTTTTACTGGTATCAGCAGCGCCCAGGAACGGCCCCCAAACTCCT |
| | | | CATCTATGGCAGTGATCAGCGGCCCTCAGGGGTCCCTGACCGATTCTC |
| | | | TGGTTCCCAGTCTGGCCCCTCAGCCTCCCTGGCCATCAGTGGGCTCCG |
| | | | GTCCGAGGATGAGGCTCATTATTACTGTGCAGCGTGGGATGACAACC |
| | | | TGAGTGGTCCGGTGTTCGGCGGAGGGACCAAGCTCACCGTCCTA |
| 12 | 186 | 186 | SYELTQPPSASGTPGQRVIISCSGSTSNSGYNYFYWYQQRPGTAPKLLIYG |
| | | | SDQRPSGVPDRFSGSQSGPSASLAISGLRSEDEAHYYCAAWDDNLSGPVF |
| | | | GGGTKLTVL |
| 12 | 187 | 187 | SGSTSNSGYNYFY |
| 12 | 188 | 188 | TCTGGAAGCACGTCCAATTCCGGATATAATTATTTTTAC |
| 12 | 189 | 189 | GSDQRPS |
| 12 | 190 | 190 | GGCAGTGATCAGCGGCCCTCA |
| 12 | 191 | 191 | AAWDDNLSGPV |
| 12 | 192 | 192 | GCAGCGTGGGATGACAACCTGAGTGGTCCGGTG |
| 13 | 193 | 193 | CAGGTCCAGCTTGTACAGTCTGGGGGAGGCTTGGTAAAGCCTGGGGG |
| | | | GTCCCGAAGACTCGCATGTGCAGCCTCTGGATTCATCTTCCGCAACGC |
| | | | CTGGATGAGCTGGGTCCGCCAGGCTCCAGGGAAGGGGCTGGAGTGGG |
| | | | TTGGCCGGATTAAAAGGACAAGTGAAGGAGGGTCAGTCGACTACGCG |
| | | | ACACCCGTGCAAGGCAGATTCTCCATCTCAAGAGATGATTCTAGAAA |
| | | | CACACTGTATCTACAAATGCACAGCCTGGCACCCGACGACACAGCCG |
| | | | TGTATTACTGTTCCACAGGCCCACCCTATTCTTACTTTGATAGTACTG |
| | | | GTTATTCGGTCGTGGACTACTGGGGCCAGGGAACCCTGGTCACCGTCT |
| | | | CTTCA |
| 13 | 194 | 194 | QVQLVQSGGGLVKPGGSRRLACAASGFIFRNAWMSWVRQAPGKGLEW |
| | | | VGRIKRTSEGGSVDYATPVQGRFSISRDDSRNTLYLQMHSLAPDDTAVY |
| | | | YCSTGPPYSYFDSTGYSVVDYWGQGTLVTVSS |
| 13 | 195 | 195 | FIFRNAWMS |
| 13 | 196 | 196 | TTCATCTTCCGCAACGCCTGGATGAGC |
| 13 | 197 | 197 | RIKRTSEGGSVDYATPVQG |
| 13 | 198 | 198 | CGGATTAAAAGGACAAGTGAAGGAGGGTCAGTCGACTACGCGACAC |
| | | | CCGTGCAAGGC |
| 13 | 199 | 199 | STGPPYSYFDSTGYSVVDY |
| 13 | 200 | 200 | TCCACAGGCCCACCCTATTCTTACTTTGATAGTACTGGTTATTCGGTC |
| | | | GTGGACTAC |
| 13 | 201 | 201 | CAGTCTGTGTTGACGCAGCCGCCCTCAGCGTCTGGGACCCCCGGGCA |
| | | | GAGGGTCACCATCTCTTGTTCTGCAAGCAGCTCCAACATCGGAGATA |
| | | | ATTATTTCTACTGGTACCAACAACTCCCAGGAAAGGCCCCCACACTCC |
| | | | TCATGTATGGTAGTGACCAGCGGTCCTCAGGGGTCCCTGACCGATTCT |
| | | | CTGGCTCCCAGTCTGGCACCTCTGCCTCCCTGGCCATCAGTGGGCTCC |
| | | | GGTCCGAGGATGAAGCTGCTTATTATTGTGCAGCTTGGGATGACAGC |
| | | | CTGAGTGGTCCGGTGTTCGGCGGAGGCACCCAGCTGACCGTCCTC |
| 13 | 202 | 202 | QSVLTQPPSASGTPGQRVTISCSASSSNIGDNYFYWYQQLPGKAPTLLMY |
| | | | GSDQRSSGVPDRFSGSQSGTSASLAISGLRSEDEAAYYCAAWDDSLSGPV |
| | | | FGGGTQLTVL |
| 13 | 203 | 203 | SASSSNIGDNYFY |
| 13 | 204 | 204 | TCTGCAAGCAGCTCCAACATCGGAGATAATTATTTCTAC |
| 13 | 205 | 205 | GSDQRSS |
| 13 | 206 | 206 | GGTAGTGACCAGCGGTCCTCA |
| 13 | 207 | 207 | AAWDDSLSGPV |
| 13 | 208 | 208 | GCAGCTTGGGATGACAGCCTGAGTGGTCCGGTG |
| 14 | 209 | 209 | GAGGTGCAGCTGGTGGAGTCTGGGGCTGAGGTGAGGAAGCCTGGGG |
| | | | CCTCAGTGAAGGTCTCCTGCAAGGCTTCTGGATACATCTTCATTAACT |
| | | | ACTATATACACTGGGTGCGACAGGCCCCTGGACAAGGTCTTGAGTGG |
| | | | ATGGGGTGGATCAACCCTAACAGTGGAGCCTCAAACCACGCACAGAC |
| | | | GTTCGAGGGCAGGATCACCATGACCACCGACACGTCCAGCAACACAG |
| | | | CCTACATGGAGCTGAGTAGACTGAGAGAGGACGACACGGCCGTCTAT |
| | | | TACTGTGCGAGATCCCAGCAACTGCTCGTTATCACCGATTACTCCTTA |
| | | | GACTACTGGGGCCTGGGAACCCTGGTCACCGTCTCCTCA |
| 14 | 210 | 210 | EVQLVESGAEVRKPGASVKVSCKASGYIFINYYIHWVRQAPGQGLEWM |
| | | | GWINPNSGASNHAQTFEGRITMTTDTSSNTAYMELSRLREDDTAVYYCA |
| | | | RSQQLLVITDYSLDYWGLGTLVTVSS |
| 14 | 211 | 211 | YIFINYYIH |
| 14 | 212 | 212 | TACATCTTCATTAACTACTATATACAC |
| 14 | 213 | 213 | WINPNSGASNHAQTFEG |
| 14 | 214 | 214 | TGGATCAACCCTAACAGTGGAGCCTCAAACCACGCACAGACGTTCGA |
| | | | GGGC |
| 14 | 215 | 215 | ARSQQLLVITDYSLDY |
| 14 | 216 | 216 | GCGAGATCCCAGCAACTGCTCGTTATCACCGATTACTCCTTAGACTAC |
| 14 | 217 | 217 | TCCTCTGAGCTGACTCAGGACCCTGCTGTGTCTGTGGCCTTGGGACAG |
| | | | ACAGTCAGGATCACATGCCACGGAGACACCCTCAGAAACTATTATCC |
| | | | AGCCTGGTACCAGCAGAAGCCAGGACAGGCCCCTGTTCTTGTCGTGT |
| | | | CTGATAGAAACACCCGGCCCTCAGGGATCCCAGACCGATTCTCTGTCT |
| | | | CCACCTCAGGAAACACAGCTTCCTTGACCATCACTGGGGCTCAGGCG |
| | | | GAAGATGAGGGTGACTATTACTGTAACTGCCGCGACAGCAGTGGTCA |
| | | | CCGGCTGGTCTTCGGCGGAGGGACCAAGCTGACCGTCCTA |
| 14 | 218 | 218 | SSELTQDPAVSVALGQTVRITCHGDTLRNYYPAWYQQKPGQAPVLVVS |
| | | | DRNTRPSGIPDRFSVSTSGNTASLTITGAQAEDEGDYYCNCRDSSGHRLV |
| | | | FGGGTKLTVL |
| 14 | 219 | 219 | HGDTLRNYYPA |
| 14 | 220 | 220 | CACGGAGACACCCTCAGAAACTATTATCCAGCC |
| 14 | 221 | 221 | DRNTRPS |
| 14 | 222 | 222 | GATAGAAACACCCGGCCCTCA |
| 14 | 223 | 223 | NCRDSSGHRLV |
| 14 | 224 | 224 | AACTGCCGCGACAGCAGTGGTCACCGGCTGGTC |
| 15 | 225 | 225 | CAGGTCCAGCTTGTGCAGTCTGGGGCTGAGGTGAAGAAGCCTGGGTC |
| | | | CTCGGTGAAGGTCTCCTGCGAGGCTTCTGGAGACACCTTCACCAGTTA |
| | | | TGCAGTCATCTGGGTGCGCCAGGCCCCAGGACAAGGGCTTGAGTGGA |
| | | | TGGGAAGTATCATCCCTATCTTTCAAACAATCAACTACGCACCAAAGT |
| | | | TCCAGGGGAGGGTCACCCTAAGCGCGGACGGATCTACGAGAACAGTC |
| | | | TACATGGAGTTGGGAAGCCTGAGATCAGAGGACACGGCCATATATTT |
| | | | CTGTGCGACCAAGAGATACTGTACTAGTCCCAGCTGCCATGGACTCT |
| | | | GGTACTTCAATCTCTGGGGCCGTGGAACCCTGGTCACCGTCTCCTCA |
| 15 | 226 | 226 | QVQLVQSGAEVKKPGSSVKVSCEASGDTFTSYAVIWVRQAPGQGLEWM |
| | | | GSIIPIFQTINYAPKFQGRVTLSADGSTRTVYMELGSLRSEDTAIYFCATKR |
| | | | YCTSPSCHGLWYFNLWGRGTLVTVSS |
| 15 | 227 | 227 | DTFTSYAVI |
| 15 | 228 | 228 | GACACCTTCACCAGTTATGCAGTCATC |
| 15 | 229 | 229 | SIIPIFQTINYAPKFQG |
| 15 | 230 | 230 | AGTATCATCCCTATCTTTCAAACAATCAACTACGCACCAAAGTTCCAG |
| | | | GGG |
| 15 | 231 | 231 | ATKRYCTSPSCHGLWYFNL |
| 15 | 232 | 232 | GCGACCAAGAGATACTGTACTAGTCCCAGCTGCCATGGACTCTGGTA |
| | | | CTTCAATCTC |
| 15 | 233 | 233 | GATATTGTGATGACCCAGTCTCCACTCTCCCTGCCCGTCACCCCTGGA |
| | | | GAGCCGGCCTCCATCTCCTGCAGGTCTAGTAAGAGCCTCTTGGATAGT |
| | | | GATGATGGAAACACCTATTTGGACTGGTACCTGCAGAAGCCAGGGCA |
| | | | GTCTCCACAGATCCTGATCTATATGCTTTCGCATCGGGCCTCTGGAGT |
| | | | CCCAGACAGGTTCAGTGGCAGTGGGTCAGGCACTGACTTCACACTGA |
| | | | AAATCAGTAGGGTGGAGGCTGAGGATGTTGGAGTTTATTACTGCATG |
| | | | CAACGTGTAGAGTATCCTTACAGTTTTGGCCAGGGGACCAAGGTGGA |
| | | | GATCAAA |
| 15 | 234 | 234 | DIVMTQSPLSLPVTPGEPASISCRSSKSLLDSDDGNTYLDWYLQKPGQSP |
| | | | QILIYMLSHRASGVPDRFSGSGSGTDFTLKISRVEAEDVGVYYCMQRVEY |
| | | | PYSFGQGTKVEIK |
| 15 | 235 | 235 | RSSKSLLDSDDGNTYLD |
| 15 | 236 | 236 | AGGTCTAGTAAGAGCCTCTTGGATAGTGATGATGGAAACACCTATTT |
| | | | GGAC |
| 15 | 237 | 237 | MLSHRAS |
| 15 | 238 | 238 | ATGCTTTCGCATCGGGCCTCT |
| 15 | 239 | 239 | MQRVEYPYS |
| 15 | 240 | 240 | ATGCAACGTGTAGAGTATCCTTACAGT |
| 16 | 241 | 241 | CAGATCACCTTGAAGGAGTCTGGGCCTACCGTGGTGAAACCCACACA |
| | | | GACCCTCACACTGACCTGCACCTTCTCTGGGTTCTCACTCAACACTCG |
| | | | TGGCATGGGTGTGGCCTGGATCCGTCAGCCCCCAGGAGGGGCCCTGG |
| | | | AGTGGCTTGCACTCGTTGATTGGGATGATGATAAGCGCTACAGCCCTT |
| | | | CTCTGAGGAGCAGGCTCACCATCACCAAAGACACGTCCAAGAACCAG |
| | | | GTGCTCTTTACAATGACCACCATGGACCCCGCGGACACAGCCACGTA |
| | | | CTACTGTGCACACATCGGTCTTTATGATCGTGGTGGCTATTACTTATT |
| | | | CTACTTTGACTTTTGGGGCCAGGGAACCCTGGTCACCGTCTCCTCA |
| 16 | 242 | 242 | QITLKESGPTVVKPTQTLTLTCTFSGFSLNTRGMGVAWIRQPPGGALEWL |
| | | | ALVDWDDDKRYSPSLRSRLTITKDTSKNQVLFTMTTMDPADTATYYCA |
| | | | HIGLYDRGGYYLFYFDFWGQGTLVTVSS |
| 16 | 243 | 243 | FSLNTRGMGVA |
| 16 | 244 | 244 | TTCTCACTCAACACTCGTGGCATGGGTGTGGCC |
| 16 | 245 | 245 | LVDWDDDKRYSPSLRS |
| 16 | 246 | 246 | CTCGTTGATTGGGATGATGATAAGCGCTACAGCCCTTCTCTGAGGAGC |
| 16 | 247 | 247 | AHIGLYDRGGYYLFYFDF |
| 16 | 248 | 248 | GCACACATCGGTCTTTATGATCGTGGTGGCTATTACTTATTCTACTTTG |
| | | | ACTTT |
| 16 | 249 | 249 | GATATTGTGCTGACGCAGTCTCCATCCTCCCTGTCTGCGTCTGTAGGC |
| | | | GACAGGGTCACCATCACTTGCCGGGCAAGTCAGAGCATTGCCAGCTA |
| | | | TGTGAATTGGTTTCAGCAGAAACCAGGGAAAGCCCCTGTCCTCTTGAT |
| | | | GTTTGCTTCATCCATTTTGCAAAGTGGCGTCCCGCCAAGGTTCCGTGG |
| | | | CAGTGGATCTGGGACAGATTTCACTCTCACCATCACCAGTCTCCAGCC |
| | | | TGAAGATTTTGCAACTTACTACTGTCAACACACTTACACCACCCCGTA |
| | | | CATTTTTGGCCGGGGGACCAAAGTGGAGATCAAA |
| 16 | 250 | 250 | DIVLTQSPSSLSASVGDRVTITCRASQSIASYVNWFQQKPGKAPVLLMFA |
| | | | SSILQSGVPPRFRGSGSGTDFTLTITSLQPEDFATYYCQHTYTTPYIFGRGT |
| | | | KVEIK |
| 16 | 251 | 251 | RASQSIASYVN |
| 16 | 252 | 252 | CGGGCAAGTCAGAGCATTGCCAGCTATGTGAAT |
| 16 | 253 | 253 | ASSILQS |
| 16 | 254 | 254 | GCTTCATCCATTTTGCAAAGT |
| 16 | 255 | 255 | QHTYTTPYI |
| 16 | 256 | 256 | CAACACACTTACACCACCCCGTACATT |
| 17 | 257 | 257 | CAGGTCCAGCTTGTGCAGTCTGGTCCTACGCTGGTGAAACCCACACA |
| | | | GACCCTCACGCTGACCTGCACCTTCTCTGGCTTCTCACTCAGCACTCG |
| | | | TGGAGTGGGTGTGGGCTGGATCCGTCAGCCCCCAGGAAAGGCCCTGG |
| | | | AGTGCCTTGGATTCACTTATTGGGATGGTGATCAGTTCCACAGCCCAT |
| | | | CTCTGAAGAACAGACTCACCATTACCAAGGACACCTCCAAAAACCAG |
| | | | GTGGTCCTTAGAATGACCAACATGGACCCTGTGGACACGGCCACCTA |
| | | | TTTCTGTGTACACAGCGATCTCTATGATAGTGGTGGTTATTACTTGTA |
| | | | CTACTTTGACTACTGGGGCCAGGGAACCCTGGTCACCGTCTCCTCA |
| 17 | 258 | 258 | QVQLVQSGPTLVKPTQTLTLTCTFSGFSLSTRGVGVGWIRQPPGKALECL |
| | | | GFTYWDGDQFHSPSLKNRLTITKDTSKNQVVLRMTNMDPVDTATYFCV |
| | | | HSDLYDSGGYYLYYFDYWGQGTLVTVSS |
| 17 | 259 | 259 | FSLSTRGVGVG |
| 17 | 260 | 260 | TTCTCACTCAGCACTCGTGGAGTGGGTGTGGGC |
| 17 | 261 | 261 | FTYWDGDQFHSPSLKN |
| 17 | 262 | 262 | TTCACTTATTGGGATGGTGATCAGTTCCACAGCCCATCTCTGAAGAAC |
| 17 | 263 | 263 | VHSDLYDSGGYYLYYFDY |
| 17 | 264 | 264 | GTACACAGCGATCTCTATGATAGTGGTGGTTATTACTTGTACTACTTT |
| | | | GACTAC |
| 17 | 265 | 265 | GACATCCAGATGACCCAGTCTCCATCCTCCCTGTCTGCTTCTGTGGGG |
| | | | GACAGAGTCACCATCACTTGCCGAGCCAGTCAGACCATTGCCAGTTA |
| | | | TTTAAATTGGTATCAGCAAAGACCAGGGGAAGCCCCTAAACTCTTGA |
| | | | TCTATGCTGCTTCCAGTTTGCAGAGTGGGGTCTCATCAAGATTCAGTG |
| | | | GCAGGGGATCTGGGACAGATTTCACTCTCACCATCAATATTCTACAAC |
| | | | CTGAGGATCTTGCAACTTACTTCTGTCAACAGGCTTACTCTGCCCCGT |
| | | | ACACTTTTGGCCAGGGGACCAAGGTGGAAATCAAA |
| 17 | 266 | 266 | DIQMTQSPSSLSASVGDRVTITCRASQTIASYLNWYQQRPGEAPKLLIYA |
| | | | ASSLQSGVSSRFSGRGSGTDFTLTINILQPEDLATYFCQQAYSAPYTFGQG |
| | | | TKVEIK |
| 17 | 267 | 267 | RASQTIASYLN |
| 17 | 268 | 268 | CGAGCCAGTCAGACCATTGCCAGTTATTTAAAT |
| 17 | 269 | 269 | AASSLQS |
| 17 | 270 | 270 | GCTGCTTCCAGTTTGCAGAGT |
| 17 | 271 | 271 | QQAYSAPYT |
| 17 | 272 | 272 | CAACAGGCTTACTCTGCCCCGTACACT |
| 18 | 273 | 273 | CAGGTCCAGCTGGTACAGTCTGGAGCTGAGGTGAAGAAGCCTGGGGC |
| | | | CTCAGTGAAGGTCTCCTGCAAGGCTTCTGGTTACACCTTTACCAGCTA |
| | | | TGGTACCAGCTGGGTGCGACAGGCCCCTGGACAAGGGCTTGAGTGGA |
| | | | TGGGATGGATCAGCGCTTACAATGGTAACACAAACTATGCACAGAAT |
| | | | CTCCAGGGCAGAGTCACCATGACCACAGACACATCAACGAGCACATC |
| | | | CTACATGGAGCTGAGGAGCCTGAGATCTGACGACACGGCCGTGTATT |
| | | | ACTGTGCGAGAGATGTCCCCGTCATAGCAGCTGGTACAATGGACTAC |
| | | | TGGGGCCAGGGAACCCTGGTCACCGTCTCCTCA |
| 18 | 274 | 274 | QVQLVQSGAEVKKPGASVKVSCKASGYTFTSYGTSWVRQAPGQGLEW |
| | | | MGWISAYNGNTNYAQNLQGRVTMTTDTSTSTSYMELRSLRSDDTAVYY |
| | | | CARDVPVIAAGTMDYWGQGTLVTVSS |
| 18 | 275 | 275 | YTFTSYGTS |
| 18 | 276 | 276 | TACACCTTTACCAGCTATGGTACCAGC |
| 18 | 277 | 277 | WISAYNGNTNYAQNLQG |
| 18 | 278 | 278 | TGGATCAGCGCTTACAATGGTAACACAAACTATGCACAGAATCTCCA |
| | | | GGGC |
| 18 | 279 | 279 | ARDVPVIAAGTMDY |
| 18 | 280 | 280 | GCGAGAGATGTCCCCGTCATAGCAGCTGGTACAATGGACTAC |
| 18 | 281 | 281 | GATATTGTGATGACCCAGACTCCACTCTCCCTGCCCGTCACCCTTGGA |
| | | | CAGCCGGCCTCCATCTCCTGCAGGTCTAGTCAAAGCCTCGTATACAGT |
| | | | GATGGAAACACCTACTTGAATTGGTTTCAGCAGAGGCCAGGCCAATC |
| | | | TCCAAGGCGCCTAATTTATAAGGTTTCTAATCGGGACTCTGGGGTCCC |
| | | | AGACAGATTCAGCGGCAGTGGGTCAGGCACTGATTTCACACTGAAAA |
| | | | TCAGCAGGGTGGAGGCTGAGGATGTTGGGGTTTATTACTGCATGCAA |
| | | | GGTCCACACTGGCCTCGAACGTTCGGCCAAGGGACCAAGGTGGAAAT |
| | | | CAAA |
| 18 | 282 | 282 | DIVMTQTPLSLPVTLGQPASISCRSSQSLVYSDGNTYLNWFQQRPGQSPR |
| | | | RLIYKVSNRDSGVPDRFSGSGSGTDFTLKISRVEAEDVGVYYCMQGPHW |
| | | | PRTFGQGTKVEIK |
| 18 | 283 | 283 | RSSQSLVYSDGNTYLN |
| 18 | 284 | 284 | AGGTCTAGTCAAAGCCTCGTATACAGTGATGGAAACACCTACTTGAAT |
| 18 | 285 | 285 | KVSNRDS |
| 18 | 286 | 286 | AAGGTTTCTAATCGGGACTCT |
| 18 | 287 | 287 | MQGPHWPRT |
| 18 | 288 | 288 | ATGCAAGGTCCACACTGGCCTCGAACG |
| 19 | 289 | 289 | CAGGTCCAGCTTGTGCAGTCTGGGGCTGAGGTGAAGAAGCCTGGGGC |
| | | | CTCAGTGAAAGTCTCGTGTGAGGCCTCTGAATACAGTTTCAGTGGCG |
| | | | ACTATGTTCACTGGGTGCGACAGGCCCCTGGACAAGGGCTTGAGTGG |
| | | | ATGGGTTGGATAAAGGCTGTCAATGGTGGCGCGAACTACGCACAGAA |
| | | | GTTTCACGGCAGGGTCACAATGACCACTGACTCGTCCAAGAGCACAG |
| | | | TCTATTTGGAGATGAGCAGACTGACACCTGCCGACACGGCCATTTATT |
| | | | TTTGTGCGAAGGATCGGGCTGCAAGTGTTCATGTGCCAGCGGGCGCG |
| | | | TTTGACCTCTGGGGCCAGGGAACCCTGGTCACCGTCTCCTCA |
| 19 | 290 | 290 | QVQLVQSGAEVKKPGASVKVSCEASEYSFSGDYVHWVRQAPGQGLEW |
| | | | MGWIKAVNGGANYAQKFHGRVTMTTDSSKSTVYLEMSRLTPADTAIYF |
| | | | CAKDRAASVHVPAGAFDLWGQGTLVTVSS |
| 19 | 291 | 291 | YSFSGDYVH |
| 19 | 292 | 292 | TACAGTTTCAGTGGCGACTATGTTCAC |
| 19 | 293 | 293 | WIKAVNGGANYAQKFHG |
| 19 | 294 | 294 | TGGATAAAGGCTGTCAATGGTGGCGCGAACTACGCACAGAAGTTTCA |
| | | | CGGC |
| 19 | 295 | 295 | AKDRAASVHVPAGAFDL |
| 19 | 296 | 296 | GCGAAGGATCGGGCTGCAAGTGTTCATGTGCCAGCGGGCGCGTTTGA |
| | | | CCTC |
| 19 | 297 | 297 | GACATCCAGATGACCCAGTCTCCTTCCTCCCTGTCTGCATATGTAGGA |
| | | | GACAGAGTCAGCATCACTTGTCGGGCAAGTCAGAGCATTGACAACTT |
| | | | TTTAAATTGGTATCGGCAGAGACCAGGGAAAGCCCCTGAACTCCTAA |
| | | | TCTATGCTGCCTCCACTTTGCAAGGTGGGGTCCCATCAAGGTTCAGTG |
| | | | GCAGTGGATCTGGGACACATTTCACTCTCACCATCAGCAGTCTCCAGC |
| | | | CTGAAGATTTTGCCACTTACTACTGTCAACAGAGTTTCACTATTCCTT |
| | | | CGATCACCTTCGGCCAAGGGACACGACTGGAGATTAAA |
| 19 | 298 | 298 | DIQMTQSPSSLSAYVGDRVSITCRASQSIDNFLNWYRQRPGKAPELLIYA |
| | | | ASTLQGGVPSRFSGSGSGTHFTLTISSLQPEDFATYYCQQSFTIPSITFGQG |
| | | | TRLEIK |
| 19 | 299 | 299 | RASQSIDNFLN |
| 19 | 300 | 300 | CGGGCAAGTCAGAGCATTGACAACTTTTTAAAT |
| 19 | 301 | 301 | AASTLQG |
| 19 | 302 | 302 | GCTGCCTCCACTTTGCAAGGT |
| 19 | 303 | 303 | QQSFTIPSIT |
| 19 | 304 | 304 | CAACAGAGTTTCACTATTCCTTCGATCACC |
| 20 | 305 | 305 | CAGGTCACCTTGAAGGAGTCTGGTCCTGCGCTGGTGAGACCCAAACA |
| | | | GACCCTCACTCTGACCTGCTCCTTCTCCGGCTTCTCACTCGACACTCA |
| | | | AAGAACGGGTGTGAATTGGATCCGTCAGTCCCCAGGGAAGGCCCTGG |
| | | | AGTGGCTTGCACGGATTGATTGGGATGGCAATATTTACTCCAGCACCT |
| | | | CTGTGAGGACCAAACTCAGCATCTCCAAGGGCACCTCCAAAAACCAG |
| | | | GTGGTCCTTACAATGACCGACGTGGACCCTGTGGACACAGCCACCTA |
| | | | TTACTGTGCACGGACTCTTTACTATACTTCTGGTGGTTATTACTTGAAC |
| | | | CTCTTTGACTACTGGGGCCAAGGAACCCTGGTCACCGTCTCCTCA |
| 20 | 306 | 306 | QVTLKESGPALVRPKQTLTLTCSFSGFSLDTQRTGVNWIRQSPGKALEWL |
| | | | ARIDWDGNIYSSTSVRTKLSISKGTSKNQVVLTMTDVDPVDTATYYCAR |
| | | | TLYYTSGGYYLNLFDYWGQGTLVTVSS |
| 20 | 307 | 307 | FSLDTQRTGVN |
| 20 | 308 | 308 | TTCTCACTCGACACTCAAAGAACGGGTGTGAAT |
| 20 | 309 | 309 | RIDWDGNIYSSTSVRT |
| 20 | 310 | 310 | CGGATTGATTGGGATGGCAATATTTACTCCAGCACCTCTGTGAGGACC |
| 20 | 311 | 311 | ARTLYYTSGGYYLNLFDY |
| 20 | 312 | 312 | GCACGGACTCTTTACTATACTTCTGGTGGTTATTACTTGAACCTCTTTG |
| | | | ACTAC |
| 20 | 313 | 313 | GAAATTGTAATGACACAGTCTCCACCCTCCCTGTCTGCCTCTGTTGGG |
| | | | GACAGAGTCACCATCACTTGCCGGGCAAGTCAGACAATTCCCAGCTA |
| | | | TGTCAATTGGTATCAGCAGATATCAGGGAAAGCCCCTCGCCTCCTGAT |
| | | | CTATGCTGCCTCACTTTTGCAAAGTGGGGTCCCATCAAGGTTCAGTGG |
| | | | CAGCGGATCTGGGACAGAGTTCAGTCTCACCATCAGCGGTCTGCGAC |
| | | | CTGAGGATTTTGGCACTTACTACTGTCAACAGAGTTACAGTTCCACTC |
| | | | CCACTTTCGGCCAGGGGACCAAGGTGGAAATCAAA |
| 20 | 314 | 314 | EIVMTQSPPSLSASVGDRVTITCRASQTIPSYVNWYQQISGKAPRLLIYAA |
| | | | SLLQSGVPSRFSGSGSGTEFSLTISGLRPEDFGTYYCQQSYSSTPTFGQGT |
| | | | KVEIK |
| 20 | 315 | 315 | RASQTIPSYVN |
| 20 | 316 | 316 | CGGGCAAGTCAGACAATTCCCAGCTATGTCAAT |
| 20 | 317 | 317 | AASLLQS |
| 20 | 318 | 318 | GCTGCCTCACTTTTGCAAAGT |
| 20 | 319 | 319 | QQSYSSTPT |
| 20 | 320 | 320 | CAACAGAGTTACAGTTCCACTCCCACT |
| 21 | 321 | 321 | CAGGTGCAGCTGGTGGAGTCTGGGGGAGGCTTGGTAAAGCCTGGGGG |
| | | | GTCCCTGAGACTCTCATGTGCAGCCTCTGGATTCATTTTCAGTAACGC |
| | | | CTGGATGAGTTGGGTCCGCCAGTCTCCAGGGAAGGGGCTGGAGTGGG |
| | | | TTGGCCGTATTAAAACCAAAACTGAGGGTGCGACAACAGACCACGCT |
| | | | GCACCCCTGAAAGGCAGATTCACCATCTCAAGAGATGATTCGAGAAA |
| | | | CACACTGTATCTCCAAATGGACAGCCTGACAACCGAGGACACAGCCG |
| | | | TGTATTTTTGTACCACAGGCCCACCTTATAGTTACTTTGACAGTACTG |
| | | | GGTATTCCATCGTTGACTACTGGGGCCAGGGAACCCTGGTCACCGTCT |
| | | | CCTCA |
| 21 | 322 | 322 | QVQLVESGGGLVKPGGSLRLSCAASGFIFSNAWMSWVRQSPGKGLEWV |
| | | | GRIKTKTEGATTDHAAPLKGRFTISRDDSRNTLYLQMDSLTTEDTAVYFC |
| | | | TTGPPYSYFDSTGYSIVDYWGQGTLVTVSS |
| 21 | 323 | 323 | FIFSNAWMS |
| 21 | 324 | 324 | TTCATTTTCAGTAACGCCTGGATGAGT |
| 21 | 325 | 325 | RIKTKTEGATTDHAAPLKG |
| 21 | 326 | 326 | CGTATTAAAACCAAAACTGAGGGTGCGACAACAGACCACGCTGCACC |
| | | | CCTGAAAGGC |
| 21 | 327 | 327 | TTGPPYSYFDSTGYSIVDY |
| 21 | 328 | 328 | ACCACAGGCCCACCTTATAGTTACTTTGACAGTACTGGGTATTCCATC |
| | | | GTTGACTAC |
| 21 | 329 | 329 | TCTTATGAGCTGACACAGCCACCCGCAGCGTCTGGGACCCCCGGGCA |
| | | | GAGGGTCACCATCTCTTGTTCCGGAAGCAGCTCCAACATCGGAAGTG |
| | | | AGTATGTATTGTGGTATCAGCAGGTCCCAGGAACGGCCCCCAAACTC |
| | | | CTCATCTATAATAGTCATCAGCGGCCCTCAGGGGTCCCTGACCGCATT |
| | | | TCTGGCTCCCGGTCTGGCACCTCTGCCTCCCTGGCCATCAGTGGGCTC |
| | | | CGGTCCGAGGATGAGGCTCATTATTACTGTGCATCCTGGGATGACAG |
| | | | CCTGAGTGGTCCGGTTTTCGGCGGAGGGACCCAGCTGACCGTCCTC |
| 21 | 330 | 330 | SYELTQPPAASGTPGQRVTISCSGSSSNIGSEYVLWYQQVPGTAPKLLIYN |
| | | | SHQRPSGVPDRISGSRSGTSASLAISGLRSEDEAHYYCASWDDSLSGPVF |
| | | | GGGTQLTVL |
| 21 | 331 | 331 | SGSSSNIGSEYVL |
| 21 | 332 | 332 | TCCGGAAGCAGCTCCAACATCGGAAGTGAGTATGTATTG |
| 21 | 333 | 333 | NSHQRPS |
| 21 | 334 | 334 | AATAGTCATCAGCGGCCCTCA |
| 21 | 335 | 335 | ASWDDSLSGPV |
| 21 | 336 | 336 | GCATCCTGGGATGACAGCCTGAGTGGTCCGGTT |
| 22 | 337 | 337 | CAGGTCCAGCTTGTACAGTCTGGGGGAGGCTTGGTAAAGCCTGGGGG |
| | | | GTCCCTTAGACTCTCATGTGCAGCCTCTGGATTCACTTTCAGTAACGC |
| | | | CTGGATGAGCTGGGTCCGCCAGGCTCCAGGGAAGGGGCTGGACTGGG |
| | | | TTGGCCGTATCAAAACCAAAGCTGATGGTGGGACAAGAGACTACGCT |
| | | | GCACCCGTGAAAGGCAGATTTACCATCTCGAGAGATGATTCAGAAAA |
| | | | CACGTTGTATCTGCAAATGACCAGCCTGAAAACCGAGGACACAGGCG |
| | | | TGTATTACTGTAGCACAGGCCCACCCTATAAATATCATGATAGTACTG |
| | | | GTTATTCGGTCGTTGACTACTGGGGCCAGGGAACCCTGGTCACTGTCT |
| | | | CCTCA |
| 22 | 338 | 338 | QVQLVQSGGGLVKPGGSLRLSCAASGFTFSNAWMSWVRQAPGKGLDW |
| | | | VGRIKTKADGGTRDYAAPVKGRFTISRDDSENTLYLQMTSLKTEDTGVY |
| | | | YCSTGPPYKYHDSTGYSVVDYWGQGTLVTVSS |
| 22 | 339 | 339 | FTFSNAWMS |
| 22 | 340 | 340 | TTCACTTTCAGTAACGCCTGGATGAGC |
| 22 | 341 | 341 | RIKTKADGGTRDYAAPVKG |
| 22 | 342 | 342 | CGTATCAAAACCAAAGCTGATGGTGGGACAAGAGACTACGCTGCACC |
| | | | CGTGAAAGGC |
| 22 | 343 | 343 | STGPPYKYHDSTGYSVVDY |
| 22 | 344 | 344 | AGCACAGGCCCACCCTATAAATATCATGATAGTACTGGTTATTCGGTC |
| | | | GTTGACTAC |
| 22 | 345 | 345 | TCTTATGAGCTGACTCAGCCACCCTCAGCGTCTGGGACCCCCGGGCA |
| | | | GAGGGTCACCATCTCCTGTTCTGGAGGCAGCTCCAACATCGGAAGTG |
| | | | ATTATGTATACTGGTACCAGCAGCTCCCAGGAACGGCCCCCAAACTC |
| | | | CTCATCTATGGTAGTAGTCAGCGACCCTCAGGGGTCCCTGACCGATTC |
| | | | TCTGGCTCCCAGTCTGGCACCTCAGCCTCCCTGGCCATCAGTGGTCTC |
| | | | CGGTCCGAGGATGAGGCTGATTATTACTGTGCTATGTGGGATGACAG |
| | | | CCTGAATGGTCCGGTGTTCGGCGGAGGGACCAAGCTGACCGTCCTA |
| 22 | 346 | 346 | SYELTQPPSASGTPGQRVTISCSGGSSNIGSDYVYWYQQLPGTAPKLLIYG |
| | | | SSQRPSGVPDRFSGSQSGTSASLAISGLRSEDEADYYCAMWDDSLNGPVF |
| | | | GGGTKLTVL |
| 22 | 347 | 347 | SGGSSNIGSDYVY |
| 22 | 348 | 348 | TCTGGAGGCAGCTCCAACATCGGAAGTGATTATGTATAC |
| 22 | 349 | 349 | GSSQRPS |
| 22 | 350 | 350 | GGTAGTAGTCAGCGACCCTCA |
| 22 | 351 | 351 | AMWDDSLNGPV |
| 22 | 352 | 352 | GCTATGTGGGATGACAGCCTGAATGGTCCGGTG |
| 23 | 353 | 353 | CAGGTGCAGCTACAGCAGTGGGGCGCAGGACTGTTGAAGCCTTCGGA |
| | | | GACCCTGTCCCTCTCCTGCACCGTCTCTGGTGGGGTCTTCGGCAATTA |
| | | | CTTTTGGAGTTGGGTCCGCCAGGCCCCAGGGAAGGGCCTGGAATGGA |
| | | | TTGGAGAAATCAATCAGATTGGAACCACCAACTACAGTCCGTCCGCG |
| | | | TCCCTCAAGAGTCGAGTCACTATATCAGTTGACCCGTCCAGGAACCA |
| | | | GTTCTCCCTGAGCCTGAGGTCTGTGACCGCCGCGGACACGGCTCGGT |
| | | | ATTACTGTACGAGATCCGAAACTTCAGATTACTTTGATAGTAGTGGTT |
| | | | ATGCATTTCATATCTGGGGCGAAGGGACAATGGTCACCGTCTCTTCA |
| 23 | 354 | 354 | QVQLQQWGAGLLKPSETLSLSCTVSGGVFGNYFWSWVRQAPGKGLEWI |
| | | | GEINQIGTTNYSPSASLKSRVTISVDPSRNQFSLSLRSVTAADTARYYCTR |
| | | | SETSDYFDSSGYAFHIWGEGTMVTVSS |
| 23 | 355 | 355 | GVFGNYFWS |
| 23 | 356 | 356 | GGGGTCTTCGGCAATTACTTTTGGAGT |
| 23 | 357 | 357 | EINQIGTTNYSPSASLKS |
| 23 | 358 | 358 | GAAATCAATCAGATTGGAACCACCAACTACAGTCCGTCCGCGTCCCT |
| | | | CAAGAGT |
| 23 | 359 | 359 | TRSETSDYFDSSGYAFHI |
| 23 | 360 | 360 | ACGAGATCCGAAACTTCAGATTACTTTGATAGTAGTGGTTATGCATTT |
| | | | CATATC |
| 23 | 361 | 361 | CTGCCTGTGCTGACTCAGCCTGCCTCCGTGTCTGGGTCTCCTGGACAG |
| | | | TCGATCACCATCTCCTGCAGTGGAATCAGCAGTGACGGTGGTCGCTAT |
| | | | AACTATGTGTCCTGGTACCAACAACACCCGGGCAAAGCCCCCAAACT |
| | | | CCTCATCTATGATGACAGTAATTGGCCTTTAGGGGTTTCTCATCGCTT |
| | | | CTCTGGGTCCAAGTCTGGCAACACGGCCTCCCTGACCATCTCTGGGCT |
| | | | CCGGGCTGAGGACGAGGCGGACTATTATTGCGGCTCATATACGGACA |
| | | | CCAACAGACTCTTCGGCGGAGGCACCCAGCTGACCGTCCTC |
| 23 | 362 | 362 | LPVLTQPASVSGSPGQSITISCSGISSDGGRYNYVSWYQQHPGKAPKLLIY |
| | | | DDSNWPLGVSHRFSGSKSGNTASLTISGLRAEDEADYYCGSYTDTNRLF |
| | | | GGGTQLTVL |
| 23 | 363 | 363 | SGISSDGGRYNYVS |
| 23 | 364 | 364 | AGTGGAATCAGCAGTGACGGTGGTCGCTATAACTATGTGTCC |
| 23 | 365 | 365 | DDSNWPL |
| 23 | 366 | 366 | GATGACAGTAATTGGCCTTTA |
| 23 | 367 | 367 | GSYTDTNRL |
| 23 | 368 | 368 | GGCTCATATACGGACACCAACAGACTC |
| 24 | 369 | 369 | GAGGTGCAGCTGGTGGAGTCGGGGGGAGGCGTGGTCCAGCCTGGGA |
| | | | GGTCCCTGAGACTCTCCTGTGCAGCCTCTGGATTCACCTTCAGTGACC |
| | | | ATGCTATGTACTGGGTCCGCCAGGCTCCAGGCAAAGGGCTAGAGTGG |
| | | | GTGGCACTTATATCATTTGATGGAAGGAATATATACTACGCAGACTCC |
| | | | GTGAAGGGCCGATTCACCATCTCCAGAGACAATTCCAAGAACACGCT |
| | | | GTATCTGCAGATGAACAGCCTGAGAGCTGAGGACACGGCTGTCTATT |
| | | | ACTGTGCGAGAGATCAATGGCTGGTTCCTGACTACTGGGGCCAGGGA |
| | | | ACCCTGGTCACCGTCTCCTCA |
| 24 | 370 | 370 | EVQLVESGGGVVQPGRSLRLSCAASGFTFSDHAMYWVRQAPGKGLEW |
| | | | VALISFDGRNIYYADSVKGRFTISRDNSKNTLYLQMNSLRAEDTAVYYC |
| | | | ARDQWLVPDYWGQGTLVTVSS |
| 24 | 371 | 371 | FTFSDHAMY |
| 24 | 372 | 372 | TTCACCTTCAGTGACCATGCTATGTAC |
| 24 | 373 | 373 | LISFDGRNIYYADSVKG |
| 24 | 374 | 374 | CTTATATCATTTGATGGAAGGAATATATACTACGCAGACTCCGTGAA |
| | | | GGGC |
| 24 | 375 | 375 | ARDQWLVPDY |
| 24 | 376 | 376 | GCGAGAGATCAATGGCTGGTTCCTGACTAC |
| 24 | 377 | 377 | CTGCCTGTGCTGACTCAGCCTGCCTCCGTGTCTGGGTCTCCTGGACAG |
| | | | TCGATCACCATCTCCTGCACTGGAACCAGCAGTGACGTTGGTGGTTAT |
| | | | AACTATGTCTCCTGGTACCAACAGCACCCAGGCAACGCCCCCAAACT |
| | | | CATGATTTATGAAGTCAGTAAGCGGCCCTCAGGGGTCCCTGATCGCTT |
| | | | CTCTGGCTTCAAGTCTGGCAACACGGCCTCCCTGACCGTCTCTGGGCT |
| | | | CCAGGCTGAGGATGAGGCTGATTATTACTGCAGCTCATATGCAGGCA |
| | | | GCAACAGTGTCTTCGGAACTGGGACCAAGCTCACCGTCCTA |
| 24 | 378 | 378 | LPVLTQPASVSGSPGQSITISCTGTSSDVGGYNYVSWYQQHPGNAPKLMI |
| | | | YEVSKRPSGVPDRFSGFKSGNTASLTVSGLQAEDEADYYCSSYAGSNSV |
| | | | FGTGTKLTVL |
| 24 | 379 | 379 | TGTSSDVGGYNYVS |
| 24 | 380 | 380 | ACTGGAACCAGCAGTGACGTTGGTGGTTATAACTATGTCTCC |
| 24 | 381 | 381 | EVSKRPS |
| 24 | 382 | 382 | GAAGTCAGTAAGCGGCCCTCA |
| 24 | 383 | 383 | SSYAGSNSV |
| 24 | 384 | 384 | AGCTCATATGCAGGCAGCAACAGTGTC |
| 25 | 385 | 385 | CAGGTCCAGCTGGTGCAGTCTGGGGGAGGCGTGGTCCAGCCTGGGGG |
| | | | GTCCCTGAGACTCTCCTGTGCAGCGTATGGACTCACCTTCAGGGCCTA |
| | | | TGGCATGCACTGGGTCCGCCAGGCTCCAGGCAAGGGGCTCGAGTGGG |
| | | | TGGCAGTGTCATGGTATGACGGAACAAATGAAGTCTATGCAGACTCA |
| | | | GTGAAGGGCCGCTTCAGAATCTCCAGAGATGATTCCAGGAGCACTCT |
| | | | ATATTTGCAAATGAATAGTCTGAGAGGCGAGGACACGGCTGTATATT |
| | | | ACTGTGCGACAGAAAGGATGTGGGAGGAAAACTCCAGCAGCTTCGGC |
| | | | TGGTGGGGCCGGGGAACCCTGGTCACCGTCTCCTCA |
| 25 | 386 | 386 | QVQLVQSGGGVVQPGGSLRLSCAAYGLTFRAYGMHWVRQAPGKGLEW |
| | | | VAVSWYDGTNEVYADSVKGRFRISRDDSRSTLYLQMNSLRGEDTAVYY |
| | | | CATERMWEENSSSFGWWGRGTLVTVSS |
| 25 | 387 | 387 | LTFRAYGMH |
| 25 | 388 | 388 | CTCACCTTCAGGGCCTATGGCATGCAC |
| 25 | 389 | 389 | VSWYDGTNEVYADSVKG |
| 25 | 390 | 390 | GTGTCATGGTATGACGGAACAAATGAAGTCTATGCAGACTCAGTGAA |
| | | | GGGC |
| 25 | 391 | 391 | ATERMWEENSSSFGW |
| 25 | 392 | 392 | GCGACAGAAAGGATGTGGGAGGAAAACTCCAGCAGCTTCGGCTGG |
| 25 | 393 | 393 | CAGGCTGTGCTGACTCAGCCTGCCTCCGTGTCTGGGTCTCCTGGACAG |
| | | | TCGATCACCATTTCCTGCACTGGAAGCAGCAGTGACGTTGGTGGTTCT |
| | | | AACTTTGTCTCCTGGTACCAACAACACCCAGGCAAAGCCCCCAAACT |
| | | | CATGGTTTATGATGTCAATCATCGGCCCTCAGGGATTTCTAATCGCTT |
| | | | CTCTGGCTCCAAGTCTGGCAACACGGCCTCCCTGACCATCTCTGGGCT |
| | | | CCAGGCTGAGGACGAGGCTGATTATTACTGCACCTCATATACAAGTA |
| | | | GAAGCTCTTATGTCTTCGGAAGTGGGACCAAGGTGACCGTACTT |
| 25 | 394 | 394 | QAVLTQPASVSGSPGQSITISCTGSSSDVGGSNFVSWYQQHPGKAPKLMV |
| | | | YDVNHRPSGISNRFSGSKSGNTASLTISGLQAEDEADYYCTSYTSRSSYVF |
| | | | GSGTKVTVL |
| 25 | 395 | 395 | TGSSSDVGGSNFVS |
| 25 | 396 | 396 | ACTGGAAGCAGCAGTGACGTTGGTGGTTCTAACTTTGTCTCC |
| 25 | 397 | 397 | DVNHRPS |
| 25 | 398 | 398 | GATGTCAATCATCGGCCCTCA |
| 25 | 399 | 399 | TSYTSRSSYV |
| 25 | 400 | 400 | ACCTCATATACAAGTAGAAGCTCTTATGTC |
| 26 | 401 | 401 | CAGGTCCAGCTGGTACAGTCTGGAACTGAAGTGAAGAAGCCTGGGGC |
| | | | CTCAGTGAAGGTCTCCTGTAAGGCCTCTGGGTACATCTTCGACCACTT |
| | | | TGCTATCACCTGGGTGCGCCAGGCCCCTGGACAAGGGCCTGAGTGGA |
| | | | TGGGATGGATCAGCGCTTATAATGGGAGAACAGAGGATTCAGGGAA |
| | | | ATTCCCGGGCAGACTCACCCTGACCACAGACCCCGCCACGCGGACAG |
| | | | CCTTCCTGGAACTGAGGGGCCTGACACCTGACGACACGGCCGTTTATT |
| | | | ACTGTGCGCGAGATGTCCCGGTCATGGGAGCCGCATTTTTGGACTACT |
| | | | GGGGCCAGGGAACCCTGGTCACCGTCTCCTCA |
| 26 | 402 | 402 | QVQLVQSGTEVKKPGASVKVSCKASGYIFDHFAITWVRQAPGQGPEWM |
| | | | GWISAYNGRTEDSGKFPGRLTLTTDPATRTAFLELRGLTPDDTAVYYCA |
| | | | RDVPVMGAAFLDYWGQGTLVTVSS |
| 26 | 403 | 403 | YIFDHFAIT |
| 26 | 404 | 404 | TACATCTTCGACCACTTTGCTATCACC |
| 26 | 405 | 405 | WISAYNGRTEDSGKFPG |
| 26 | 406 | 406 | TGGATCAGCGCTTATAATGGGAGAACAGAGGATTCAGGGAAATTCCC |
| | | | GGGC |
| 26 | 407 | 407 | ARDVPVMGAAFLDY |
| 26 | 408 | 408 | GCGCGAGATGTCCCGGTCATGGGAGCCGCATTTTTGGACTAC |
| 26 | 409 | 409 | GAAATTGTATTGACACAGTCTCCACTCTCCCTGCCCGTCACTGTTGGA |
| | | | CAGCCGGCCTCCATCTCCTGCAGGTCTGGCCAAAGTCTCGAATTCAGT |
| | | | GATGGAAACACCTACTTGACTTGGTTTCACCAGAGGCCAGGCCAATC |
| | | | TCCAAGGCGCCTAATTTATAGGGGTTCTTACCGGGACTCTGGGGTCCC |
| | | | CGACAGATTCCGCGGCAGTGGCTCAGGCACTACTTTCACACTGACAA |
| | | | TCAGCAGGGTGGAGGCTGAGGATGTTGGGATTTATTTCTGCATGCAA |
| | | | GGTACACACTGGCCTCCGACCTTCGGCCAAGGGACCAAAGTGGATAT |
| | | | CAAA |
| 26 | 410 | 410 | EIVLTQSPLSLPVTVGQPASISCRSGQSLEFSDGNTYLTWFHQRPGQSPRR |
| | | | LIYRGSYRDSGVPDRFRGSGSGTTFTLTISRVEAEDVGIYFCMQGTHWPP |
| | | | TFGQGTKVDIK |
| 26 | 411 | 411 | RSGQSLEFSDGNTYLT |
| 26 | 412 | 412 | AGGTCTGGCCAAAGTCTCGAATTCAGTGATGGAAACACCTACTTGACT |
| 26 | 413 | 413 | RGSYRDS |
| 26 | 414 | 414 | AGGGGTTCTTACCGGGACTCT |
| 26 | 415 | 415 | MQGTHWPPT |
| 26 | 416 | 416 | ATGCAAGGTACACACTGGCCTCCGACC |
| 27 | 417 | 417 | CAGGTCCAGCTGGTGCAGTCTGGGGCTGAGGTGAAGAAGCCTGGGGC |
| | | | CTCAGTGAAAGTCTCCTGTGAGGCCTCTGCATACAGTTTCAGCGGCGA |
| | | | CTATGTTCACTGGGTGCGACAGGCCCCTGGACAAGGGCTTGAGTGGA |
| | | | TGGGTTGGATAAAGGCTGTCAATGGTGGCGCAAACTATGCACAGAGG |
| | | | TTTCACGGCAGGGTCACCATGACCACTGACTCGTCCAGGAGCACAGT |
| | | | CTATCTGGAGCTGACCAGGCTGACACCTGACGACACGGCCGTTTATTT |
| | | | TTGTGCGAAAGATCGAGCTGCAAGTGTTCATGTGCCAGCTGGTGAGT |
| | | | TTGACCTCTGGGGCCAGGGAACCCTGGTCACCGTCTCCTCA |
| 27 | 418 | 418 | QVQLVQSGAEVKKPGASVKVSCEASAYSFSGDYVHWVRQAPGQGLEW |
| | | | MGWIKAVNGGANYAQRFHGRVTMTTDSSRSTVYLELTRLTPDDTAVYF |
| | | | CAKDRAASVHVPAGEFDLWGQGTLVTVSS |
| 27 | 419 | 419 | YSFSGDYVH |
| 27 | 420 | 420 | TACAGTTTCAGCGGCGACTATGTTCAC |
| 27 | 421 | 421 | WIKAVNGGANYAQRFHG |
| 27 | 422 | 422 | TGGATAAAGGCTGTCAATGGTGGCGCAAACTATGCACAGAGGTTTCA |
| | | | CGGC |
| 27 | 423 | 423 | AKDRAASVHVPAGEFDL |
| 27 | 424 | 424 | GCGAAAGATCGAGCTGCAAGTGTTCATGTGCCAGCTGGTGAGTTTGA |
| | | | CCTC |
| 27 | 425 | 425 | GACATCCAGGTGACCCAGTCTCCTTCCTCCCTGTCTGCATCTGTAGGA |
| | | | GACAGAGTCAGCATCACTTGTCGGGCAAGTCAGAGCATTAGCAACTT |
| | | | TTTAAATTGGTATCGGCAGAGACCAGGGAAAGCCCCTGAGCTCCTAA |
| | | | TCTATGCTGCCTCCACTTTGCAAGGTGGGGTCCCATCAAGGTTCAGTG |
| | | | GCAGTGGATCTGGGACACATTTCACTCTCACCATCAGCAGTCTCCAGC |
| | | | CTGAAGATTTTGCAACTTACTACTGTCAACAGAGTTACACTATTCCTT |
| | | | CGATCACCTTCGGCCAAGGGACACGACTGGAGATTAAA |
| 27 | 426 | 426 | DIQVTQSPSSLSASVGDRVSITCRASQSISNFLNWYRQRPGKAPELLIYAA |
| | | | STLQGGVPSRFSGSGSGTHFTLTISSLQPEDFATYYCQQSYTIPSITFGQGT |
| | | | RLEIK |
| 27 | 427 | 427 | RASQSISNFLN |
| 27 | 428 | 428 | CGGGCAAGTCAGAGCATTAGCAACTTTTTAAAT |
| 27 | 429 | 429 | AASTLQG |
| 27 | 430 | 430 | GCTGCCTCCACTTTGCAAGGT |
| 27 | 431 | 431 | QQSYTIPSIT |
| 27 | 432 | 432 | CAACAGAGTTACACTATTCCTTCGATCACC |
| 28 | 433 | 433 | CAGGTGCAGCTGTTGGAGTCGGGCGCAGGACTTTTGAAGCCTTCGGA |
| | | | GACCCTGTCCCTCACCTGCTCTTTGTCTGGTGGGTCCTTCAGAGACTT |
| | | | CTACTGGGCCTGGATTCGCCAGGCCCCCGGGAGGGGGCTGGAGTGGA |
| | | | TTGGGGACATCAATGACGGTGGAAACACCAACCACAGTCCGTCCCTC |
| | | | AAGAGTCGAGCCATCCTTTCCATAGACGCGTCCAAGAGGCAGTTCTC |
| | | | CCTGAGACTGACCTCTGTGACCGCCGCGGACACGGCTGTTTATTATTG |
| | | | CGCGAGACAGAGGCTCGAACACACGGCATCTGGATATTACATGGACG |
| | | | TCTGGGGCAACGGGACCACGGTCACCGTCTCCTCA |
| 28 | 434 | 434 | QVQLLESGAGLLKPSETLSLTCSLSGGSFRDFYWAWIRQAPGRGLEWIG |
| | | | DINDGGNTNHSPSLKSRAILSIDASKRQFSLRLTSVTAADTAVYYCARQR |
| | | | LEHTASGYYMDVWGNGTTVTVSS |
| 28 | 435 | 435 | GSFRDFYWA |
| 28 | 436 | 436 | GGGTCCTTCAGAGACTTCTACTGGGCC |
| 28 | 437 | 437 | DINDGGNTNHSPSLKS |
| 28 | 438 | 438 | GACATCAATGACGGTGGAAACACCAACCACAGTCCGTCCCTCAAGAGT |
| 28 | 439 | 439 | ARQRLEHTASGYYMDV |
| 28 | 440 | 440 | GCGAGACAGAGGCTCGAACACACGGCATCTGGATATTACATGGACGTC |
| 28 | 441 | 441 | CAGTCTGTCCTGACGCAGCCGCCCTCGGTGTCAGTGGACCCAGGAGA |
| | | | GACGGCCACCATTACCTGTGGCGGAGCCAACATTGGTTCTAAAAATG |
| | | | TCTACTGGTATCAGCAGAGGCCAGGCCAGGCCCCTGTGCTGGTCGTCT |
| | | | ATGATGATATCGACCGGCCCGCAGGGATCCCTGATCGATTCACTGAC |
| | | | TCTAGTTCTGGGAACACGGTCACCCTGACCATCTACAGCGTCGAGGC |
| | | | CGTGGATGAGGCCGACTATTTCTGTCAGGTGTGGGATAATTCTTCTGA |
| | | | TCAGCCGGTGTTCGGCGGAGGGACCAAGCTCACCGTCCTC |
| 28 | 442 | 442 | QSVLTQPPSVSVDPGETATITCGGANIGSKNVYWYQQRPGQAPVLVVYD |
| | | | DIDRPAGIPDRFTDSSSGNTVTLTIYSVEAVDEADYFCQVWDNSSDQPVF |
| | | | GGGTKLTVL |
| 28 | 443 | 443 | GGANIGSKNVY |
| 28 | 444 | 444 | GGCGGAGCCAACATTGGTTCTAAAAATGTCTAC |
| 28 | 445 | 445 | DDIDRPA |
| 28 | 446 | 446 | GATGATATCGACCGGCCCGCA |
| 28 | 447 | 447 | QVWDNSSDQPV |
| 28 | 448 | 448 | CAGGTGTGGGATAATTCTTCTGATCAGCCGGTG |
| 29 | 449 | 449 | CAGGTCCAGCTTGTGCAGTCTGGAGCAGAGGCGAAAAAGCCCGGGG |
| | | | AGCCTCTGAGGATCTCCTGTAAGGGTTCTGGATACACCTTTAGCAGCT |
| | | | ACTGGATCAGCTGGGTGCGCCAGAGGCCCGGGGAACGCCTGGAGTGG |
| | | | ATGGGGAGAATTGATCCGAGTGACTCCTATGCCTACTCGAGCCCGTC |
| | | | CTTCCAAGGCCACGTCACCTTCTCAGCTGACAAGTCCAGCAACACTGC |
| | | | CTTTTTGCAGTGGAGCAGCCTGCAGGCCTCGGACACCGCCATCTATTA |
| | | | CTGCGCGAGACACAAAGAGAATTACGATTTTTGGGATTTCTGGGGCC |
| | | | AGGGCACAATGGTCACCGTCTCTTCA |
| 29 | 450 | 450 | QVQLVQSGAEAKKPGEPLRISCKGSGYTFSSYWISWVRQRPGERLEWMG |
| | | | RIDPSDSYAYSSPSFQGHVTFSADKSSNTAFLQWSSLQASDTAIYYCARH |
| | | | KENYDFWDFWGQGTMVTVSS |
| 29 | 451 | 451 | YTFSSYWIS |
| 29 | 452 | 452 | TACACCTTTAGCAGCTACTGGATCAGC |
| 29 | 453 | 453 | RIDPSDSYAYSSPSFQG |
| 29 | 454 | 454 | AGAATTGATCCGAGTGACTCCTATGCCTACTCGAGCCCGTCCTTCCAA |
| | | | GGC |
| 29 | 455 | 455 | ARHKENYDFWDF |
| 29 | 456 | 456 | GCGAGACACAAAGAGAATTACGATTTTTGGGATTTC |
| 29 | 457 | 457 | GAAACGACACTCACGCAGTCTCCAGACTCCCTGGCTGTGTCCCTGGG |
| | | | CGAGAGGGCCACCATCAACTGCAGGTCCAGCCAGCCTATTTTGTTCA |
| | | | ACCCCATCAATAAACTCTCCTTAGCTTGGTACCAGCTCAAACCAGGAC |
| | | | AGCCTCCTAAGCTGCTCATTTCCTGGGCATCTACCCGGGAACCCGGGG |
| | | | TCCCTGACCGATTCAATGGCAGCGGGTCTGGGACAGTTTTCACTCTCA |
| | | | CCATCAGCAGCCTGCAGCCTGAAGATGTGGCAGTTTATGTCTGTCAGC |
| | | | AATATTTTACTAGTACTTTTTTCGGCCCTGGGACCAAGGTGGAAATCA |
| | | | AA |
| 29 | 458 | 458 | ETTLTQSPDSLAVSLGERATINCRSSQPILFNPINKLSLAWYQLKPGQPPK |
| | | | LLISWASTREPGVPDRFNGSGSGTVFTLTISSLQPEDVAVYVCQQYFTSTF |
| | | | FGPGTKVEIK |
| 29 | 459 | 459 | RSSQPILFNPINKLSLA |
| 29 | 460 | 460 | AGGTCCAGCCAGCCTATTTTGTTCAACCCCATCAATAAACTCTCCTTA |
| | | | GCT |
| 29 | 461 | 461 | WASTREP |
| 29 | 462 | 462 | TGGGCATCTACCCGGGAACCC |
| 29 | 463 | 463 | QQYFTSTF |
| 29 | 464 | 464 | CAGCAATATTTTACTAGTACTTTT |
| 30 | 465 | 465 | GAGGTGCAGCTGTTGGAGTCTGGAAGTGAGGTGAAGAAGCCTGGGAC |
| | | | CTCAGTGAAGGTCTCCTGCGAGACTTCTGGTTACATCTTTACCAACTA |
| | | | TGCTATCTCCTGGGTGCGACAGGCCCCTGGACAGGGTCTTGAGTGGCT |
| | | | GGGTTGGATCAGTGGTTACAATGGTCAGACCTACTATGCGCAGAAGG |
| | | | TCCAGGGTAGACTCACCCTGACCACAGACACGTCCACGATGACAGCC |
| | | | TACATGGACCTGACGAGCCTTAGATCTGACGACACGGCCATTTATTAT |
| | | | TGTGTGAGAGATGTCCCCGTGATTTCAGGCGCTTCCACAATGGACTAC |
| | | | TGGGGCCAGGGAACCCTGGTCACCGTCTCCTCA |
| 30 | 466 | 466 | EVQLLESGSEVKKPGTSVKVSCETSGYIFTNYAISWVRQAPGQGLEWLG |
| | | | WISGYNGQTYYAQKVQGRLTLTTDTSTMTAYMDLTSLRSDDTAIYYCV |
| | | | RDVPVISGASTMDYWGQGTLVTVSS |
| 30 | 467 | 467 | YIFTNYAIS |
| 30 | 468 | 468 | TACATCTTTACCAACTATGCTATCTCC |
| 30 | 469 | 469 | WISGYNGQTYYAQKVQG |
| 30 | 470 | 470 | TGGATCAGTGGTTACAATGGTCAGACCTACTATGCGCAGAAGGTCCA |
| | | | GGGT |
| 30 | 471 | 471 | VRDVPVISGASTMDY |
| 30 | 472 | 472 | GTGAGAGATGTCCCCGTGATTTCAGGCGCTTCCACAATGGACTAC |
| 30 | 473 | 473 | GATATTGTGATGACGCAGTCTCCACTCTCCCTGCCCGTCACCCATGGA |
| | | | CAGCCGGCCTCCATCTCCTGCAGGTCTAGTCAAAGCCTCGTTTACAGC |
| | | | GATGGAAACACCTACTTGAGTTGGTTTCAGCTGAGGCCAGGCCAATC |
| | | | TCCAAGGCGCCTAATTTATAAGGTTTCTAACCGGGACTCTGGGGTCCC |
| | | | AGACAGATTCAGCGGCAGTGGGTCAGGCACTGATTTCACACTGAAAA |
| | | | TCAGCCGGGTGGAGGCTGAGGATGTTGGAGTTTATTACTGCATGCAA |
| | | | GCTACACAGTGGCCTCGAACGTTCGGCCAAGGGACCAAGGTGGAGAT |
| | | | CAAA |
| 30 | 474 | 474 | DIVMTQSPLSLPVTHGQPASISCRSSQSLVYSDGNTYLSWFQLRPGQSPRR |
| | | | LIYKVSNRDSGVPDRFSGSGSGTDFTLKISRVEAEDVGVYYCMQATQWP |
| | | | RTFGQGTKVEIK |
| 30 | 475 | 475 | RSSQSLVYSDGNTYLS |
| 30 | 476 | 476 | AGGTCTAGTCAAAGCCTCGTTTACAGCGATGGAAACACCTACTTGAGT |
| 30 | 477 | 477 | KVSNRDS |
| 30 | 478 | 478 | AAGGTTTCTAACCGGGACTCT |
| 30 | 479 | 479 | MQATQWPRT |
| 30 | 480 | 480 | ATGCAAGCTACACAGTGGCCTCGAACG |
| 31 | 481 | 481 | CAGGTCCAGCTTGTACAGTCTGGTCCTACGCTGGTGAGGCCCACACA |
| | | | GACCCTCACGCTGACTTGCACCTTCTCTGGGTTCTCACTCTCTACTCGT |
| | | | GGCGTGGGCGTGGGCTGGGTCCGTCAGTCCCCAGGAAAGGCCCCGGA |
| | | | GTTCCTTGTTCTCGCTCATTGGGATGATGATAAGATCTACAGTCCATC |
| | | | TCTCAGGCGCAGACTCTCCGTCACCAAGGATGTCTCCAAAAACCAGG |
| | | | TGGTCCTTGCCTTGACCAACGTGGACCCTGTGGACACAGGCACATATT |
| | | | TCTGTGTCAAGAGCGATCTCTATGATAGAGGTGGCTATTACTTATATT |
| | | | ACTTTGATCATTGGGGTCAGGGAACCCTGGTCACCGTCTCCTCA |
| 31 | 482 | 482 | QVQLVQSGPTLVRPTQTLTLTCTFSGFSLSTRGVGVGWVRQSPGKAPEFL |
| | | | VLAHWDDDKIYSPSLRRRLSVTKDVSKNQVVLALTNVDPVDTGTYFCV |
| | | | KSDLYDRGGYYLYYFDHWGQGTLVTVSS |
| 31 | 483 | 483 | FSLSTRGVGVG |
| 31 | 484 | 484 | TTCTCACTCTCTACTCGTGGCGTGGGCGTGGGC |
| 31 | 485 | 485 | LAHWDDDKIYSPSLRR |
| 31 | 486 | 486 | CTCGCTCATTGGGATGATGATAAGATCTACAGTCCATCTCTCAGGCGC |
| 31 | 487 | 487 | VKSDLYDRGGYYLYYFDH |
| 31 | 488 | 488 | GTCAAGAGCGATCTCTATGATAGAGGTGGCTATTACTTATATTACTTT |
| | | | GATCAT |
| 31 | 489 | 489 | GACATCCGGATGACCCAGTCTCCATCCTCCCTGTCTGCATCTGTGGGG |
| | | | GACAGAGTCACCATCACTTGCCGGGCAAGTCAGACCATTGCCAGTTA |
| | | | TGTGAATTGGTATCTGCAAAGACCAGGGGAAGCCCCTAAACTCCTGA |
| | | | TCTATGCAGCTTCCAATTTGCACAGTGGGGCCCCACCGTCACTCATTG |
| | | | GCAGGGGCTCTGGGACAGATTTCACTCTCACCATCAACACTCTGCAA |
| | | | CCTGAACATTTTGGAACTTACTTCTGTCAGCAGACTTTCTCCTCTCCAT |
| | | | ACACTTTTGGCCAGGGGACCAAGGTGGAAATCAAA |
| 31 | 490 | 490 | DIRMTQSPSSLSASVGDRVTITCRASQTIASYVNWYLQRPGEAPKLLIYA |
| | | | ASNLHSGAPPSLIGRGSGTDFTLTINTLQPEHFGTYFCQQTFSSPYTFGQG |
| | | | TKVEIK |
| 31 | 491 | 491 | RASQTIASYVN |
| 31 | 492 | 492 | CGGGCAAGTCAGACCATTGCCAGTTATGTGAAT |
| 31 | 493 | 493 | AASNLHS |
| 31 | 494 | 494 | GCAGCTTCCAATTTGCACAGT |
| 31 | 495 | 495 | QQTFSSPYT |
| 31 | 496 | 496 | CAGCAGACTTTCTCCTCTCCATACACT |
| 32 | 497 | 497 | CAGGTGCAGCTGGTGGAGTCTGGTCCTACGCTGGTGAAGCCCACACA |
| | | | GACCCTCACGCTGACCTGCACCTTCTCTGGGTTCTCACTCACTACTCG |
| | | | TGGCGTGGGTGTGGGCTGGGTCCGTCAGCCCCCAGGAAAGGCCCTGG |
| | | | AGTTCCTTGGACTCACTCATTGGGATGATGATAAGATCTACAGCCCAT |
| | | | CTCTCAGGCGCAGACTCACCATCACCAAGGACACCTCCAAAAACCAG |
| | | | GTGGTCCTTGCATTGGCCAACGTGGACCCTGTGGACACAGCCACATA |
| | | | TTTCTGTGTAAAAAGCGATCTCTATGATAGAGGTGGTTATTACTTATA |
| | | | CTACTTTGACTATTGGGGTCAGGGAACCCTGGTCACCGTCTCCTCA |
| 32 | 498 | 498 | QVQLVESGPTLVKPTQTLTLTCTFSGFSLTTRGVGVGWVRQPPGKALEFL |
| | | | GLTHWDDDKIYSPSLRRRLTITKDTSKNQVVLALANVDPVDTATYFCVK |
| | | | SDLYDRGGYYLYYFDYWGQGTLVTVSS |
| 32 | 499 | 499 | FSLTTRGVGVG |
| 32 | 500 | 500 | TTCTCACTCACTACTCGTGGCGTGGGTGTGGGC |
| 32 | 501 | 501 | LTHWDDDKIYSPSLRR |
| 32 | 502 | 502 | CTCACTCATTGGGATGATGATAAGATCTACAGCCCATCTCTCAGGCGC |
| 32 | 503 | 503 | VKSDLYDRGGYYLYYFDY |
| 32 | 504 | 504 | GTAAAAAGCGATCTCTATGATAGAGGTGGTTATTACTTATACTACTTT |
| | | | GACTAT |
| 32 | 505 | 505 | GAAATTGTGTTGACACAGTCTCCATCCTCCCTGTCTGCATCTGTGGGG |
| | | | GACAGAGTCACCATCACTTGCCGGGCAAGTCAGACCATTCCCAGTTA |
| | | | TGTAAATTGGTATCTGCAAAGACCAGGGGAAGCCCCTAAACTCCTGA |
| | | | TCTATGGTGCTTCCAATTTGCACACTGGGGCCCCACCAACATTCATTG |
| | | | GCAGGGGATCTGGGGCAGATTTCACTCTCACCATCAACACTCTGCAA |
| | | | CCTGAACATTTTGGAACCTACTACTGTCAACAGACTTTCTCCTCTCCA |
| | | | TACACTTTTGGCCAGGGGACCAAGGTGGAAATCAAA |
| 32 | 506 | 506 | EIVLTQSPSSLSASVGDRVTITCRASQTIPSYVNWYLQRPGEAPKLLIYGA |
| | | | SNLHTGAPPTFIGRGSGADFTLTINTLQPEHFGTYYCQQTFSSPYTFGQGT |
| | | | KVEIK |
| 32 | 507 | 507 | RASQTIPSYVN |
| 32 | 508 | 508 | CGGGCAAGTCAGACCATTCCCAGTTATGTAAAT |
| 32 | 509 | 509 | GASNLHT |
| 32 | 510 | 510 | GGTGCTTCCAATTTGCACACT |
| 32 | 511 | 511 | QQTFSSPYT |
| 32 | 512 | 512 | CAACAGACTTTCTCCTCTCCATACACT |
| 33 | 513 | 513 | CAGGTCACCTTGAAGGAGTCTGGTCCTGCGCTGGTGAAACCCACAGA |
| | | | GACCCTCACACTGACCTGTACCTTCTCTGGCTTCTCACTCAGCACTAA |
| | | | AAGACTGAGTGTGAGTTGGATCCGTCAGCCCCCAGGGAAGGCCCTGG |
| | | | AGTGGCTTGCTCGCATAGATTGGGATGATGATAAATCTTACAGCACA |
| | | | TCTCTGAGGACCAGGCTCACCATCGCCAAGGACACTTCCAAAAACCA |
| | | | GGTCGTCCTTACAATGACCAACATGGGCCCCGCGGACACAGCCACCT |
| | | | ATTTCTGTGTTCGGTCTTCTGTATATGCTAGTAATGCTTATTACCTCTA |
| | | | CTACTTTGACTCTTGGGGCCAGGGAACCCTGGTCACCGTCTCCTCA |
| 33 | 514 | 514 | QVTLKESGPALVKPTETLTLTCTFSGFSLSTKRLSVSWIRQPPGKALEWL |
| | | | ARIDWDDDKSYSTSLRTRLTIAKDTSKNQVVLTMTNMGPADTATYFCV |
| | | | RSSVYASNAYYLYYFDSWGQGTLVTVSS |
| 33 | 515 | 515 | FSLSTKRLSVS |
| 33 | 516 | 516 | TTCTCACTCAGCACTAAAAGACTGAGTGTGAGT |
| 33 | 517 | 517 | RIDWDDDKSYSTSLRT |
| 33 | 518 | 518 | CGCATAGATTGGGATGATGATAAATCTTACAGCACATCTCTGAGGACC |
| 33 | 519 | 519 | VRSSVYASNAYYLYYFDS |
| 33 | 520 | 520 | GTTCGGTCTTCTGTATATGCTAGTAATGCTTATTACCTCTACTACTTTG |
| | | | ACTCT |
| 33 | 521 | 521 | GACATCCGGATGACCCAGTCTCCATCTTCCCTGTCTGCATCTGTCGGA |
| | | | GACAGAGTCACCATCACTTGCCGGGCAAGTCAGAGCATTGCCACCTA |
| | | | CTTAAATTGGTATCAGCACAAACCAGGGAAAGCCCCTACCCTCCTGA |
| | | | TCTATGCTGCATCCATTTTGCACAGTGGTGTCCCGCCAAGGTTCAGTG |
| | | | GCCGTGCCTCTGGGACAGATTTCACTCTCACCATCAGCAGTCTGCAAC |
| | | | CTGAAGATTTTGCAACTTACTACTGTCAACAGGCCTACAGTTCCCCTT |
| | | | ACACTTTTGGCCAGGGGACCAAAGTGGATATCAAA |
| 33 | 522 | 522 | DIRMTQSPSSLSASVGDRVTITCRASQSIATYLNWYQHKPGKAPTLLIYA |
| | | | ASILHSGVPPRFSGRASGTDFTLTISSLQPEDFATYYCQQAYSSPYTFGQG |
| | | | TKVDIK |
| 33 | 523 | 523 | RASQSIATYLN |
| 33 | 524 | 524 | CGGGCAAGTCAGAGCATTGCCACCTACTTAAAT |
| 33 | 525 | 525 | AASILHS |
| 33 | 526 | 526 | GCTGCATCCATTTTGCACAGT |
| 33 | 527 | 527 | QQAYSSPYT |
| 33 | 528 | 528 | CAACAGGCCTACAGTTCCCCTTACACT |
| 34 | 529 | 529 | CAGGTCCAGCTGGTGCAGTCTGGGGCTGAGGTGAAGAAGCCTGGGTC |
| | | | CTCAGTGAAGGTCTCCTGCAAGGCTTCTGGAGGCACCTTCGGCAGCT |
| | | | ATGCTGTCATCTGGGTGCGACAGGCCCCTGGACAAGGGCTTGAGTGG |
| | | | ATGGGACATATCATCCCTGTTTTTGGGACAATAAACAACGCACAGAA |
| | | | GTTCCAGGGCAGACTCACCCTTAGCGCAGACGAATCCACGGGCACAG |
| | | | TCTACATGGGGCTGAGCAGCCTGAGATCTGACGACACGGCCGTGTAT |
| | | | TTCTGTGCGACCAAGAGATATTGTAGTGATCCCAGCTGCCATGGACTC |
| | | | TGGTACTTCGATCTCTGGGGCCGTGGCACCCTGGTCACCGTCTCCTCA |
| 34 | 530 | 530 | QVQLVQSGAEVKKPGSSVKVSCKASGGTFGSYAVIWVRQAPGQGLEW |
| | | | MGHIIPVFGTINNAQKFQGRLTLSADESTGTVYMGLSSLRSDDTAVYFCA |
| | | | TKRYCSDPSCHGLWYFDLWGRGTLVTVSS |
| 34 | 531 | 531 | GTFGSYAVI |
| 34 | 532 | 532 | GGCACCTTCGGCAGCTATGCTGTCATC |
| 34 | 533 | 533 | HIIPVFGTINNAQKFQG |
| 34 | 534 | 534 | CATATCATCCCTGTTTTTGGGACAATAAACAACGCACAGAAGTTCCA |
| | | | GGGC |
| 34 | 535 | 535 | ATKRYCSDPSCHGLWYFDL |
| 34 | 536 | 536 | GCGACCAAGAGATATTGTAGTGATCCCAGCTGCCATGGACTCTGGTA |
| | | | CTTCGATCTC |
| 34 | 537 | 537 | GACATCCGGTTGACCCAGTCTCCACTCTCCCTGCCCGTCACCCCTGGA |
| | | | GAGCCGGCCTCCATCTCCTGCAGGTCTAGTCAGAGCCTCTTGGATAGT |
| | | | GATGATGGAAACACCTATTTGGACTGGTACCTGCAGAAGCCAGGGCA |
| | | | GTCTCCACAGGTCCTGATCTATATGCTTTCGTATCGGGCCTCTGGAGT |
| | | | CCCAGACAGGTTCAGTGGCAGTGGGTCAGGCACTGATTTCACACTGA |
| | | | AAATCAGCAGGGTGGAGGCTGAGGATGTTGGAGTTTATTACTGCATG |
| | | | CAACGTGCAGAGTTTCCTTACACTTTTGGCCAGGGGACCAAGCTGGA |
| | | | GATCAAA |
| 34 | 538 | 538 | DIRLTQSPLSLPVTPGEPASISCRSSQSLLDSDDGNTYLDWYLQKPGQSPQ |
| | | | VLIYMLSYRASGVPDRFSGSGSGTDFTLKISRVEAEDVGVYYCMQRAEF |
| | | | PYTFGQGTKLEIK |
| 34 | 539 | 539 | RSSQSLLDSDDGNTYLD |
| 34 | 540 | 540 | AGGTCTAGTCAGAGCCTCTTGGATAGTGATGATGGAAACACCTATTT |
| | | | GGAC |
| 34 | 541 | 541 | MLSYRAS |
| 34 | 542 | 542 | ATGCTTTCGTATCGGGCCTCT |
| 34 | 543 | 543 | MQRAEFPYT |
| 34 | 544 | 544 | ATGCAACGTGCAGAGTTTCCTTACACT |
| 35 | 545 | 545 | CAGGTCCAGCTTGTGCAGTCTGGAGCAGAGGTGAAAAAGCCCGGGGA |
| | | | GCCTCTGAGGATCTCCTGTAAGGGTTCTGGATACACCTTTACCAGCTA |
| | | | CTGGATCAGTTGGGTGCGCCAGATGCCCGGGACAGGCCTTGAGTGGA |
| | | | TGGGGAGAATTGATCCGAGTGACTCCTATACCTACTCGAGCCCGTCCT |
| | | | TCCAAGGCCACGTCACCATCTCAGTTGACAAGTCCATCAGCACTGCCT |
| | | | ACCTGCAATGGAGCAGCCTGAAGGCCTCGGACACCGCCATATATTAC |
| | | | TGTGCGAGACACAAAGAGAATTACGATTTTTGGGATTTTTGGGGCCA |
| | | | GGGAACCCTGGTCACCGTCTCCTCA |
| 35 | 546 | 546 | QVQLVQSGAEVKKPGEPLRISCKGSGYTFTSYWISWVRQMPGTGLEWM |
| | | | GRIDPSDSYTYSSPSFQGHVTISVDKSISTAYLQWSSLKASDTAIYYCARH |
| | | | KENYDFWDFWGQGTLVTVSS |
| 35 | 547 | 547 | YTFTSYWIS |
| 35 | 548 | 548 | TACACCTTTACCAGCTACTGGATCAGT |
| 35 | 549 | 549 | RIDPSDSYTYSSPSFQG |
| 35 | 550 | 550 | AGAATTGATCCGAGTGACTCCTATACCTACTCGAGCCCGTCCTTCCAA |
| | | | GGC |
| 35 | 551 | 551 | ARHKENYDFWDF |
| 35 | 552 | 552 | GCGAGACACAAAGAGAATTACGATTTTTGGGATTTT |
| 35 | 553 | 553 | GAAACGACACTCACGCAGTCTCCAGACTCCCTGGCTGTGTCCCTGGG |
| | | | CGAGAGGGCCACCATCAACTGCAAGTCCAGCCAGACTATTTTCTTCA |
| | | | ACTCCAATAATAAGATCTCCTTAGCTTGGTACCAGCAGAAACCAGGA |
| | | | CAGCCTCCTAAGCTGCTCATTTCCTGGGCATCTACCCGCGAATCCGGG |
| | | | GTCCCTGACCGATTCAGTGGCAGCGGGTCTGGGACAGATTTCACTCTC |
| | | | ACCATCAGCAGCCTGCAGCCTGAGGATGTGGCAGTTTATTTCTGTCAG |
| | | | CAATATTATAGTAGTGCTTTTTTCGGCCCTGGGACACGACTGGAGATT |
| | | | AAA |
| 35 | 554 | 554 | ETTLTQSPDSLAVSLGERATINCKSSQTIFFNSNNKISLAWYQQKPGQPPK |
| | | | LLISWASTRESGVPDRFSGSGSGTDFTLTISSLQPEDVAVYFCQQYYSSAF |
| | | | FGPGTRLEIK |
| 35 | 555 | 555 | KSSQTIFFNSNNKISLA |
| 35 | 556 | 556 | AAGTCCAGCCAGACTATTTTCTTCAACTCCAATAATAAGATCTCCTTA |
| | | | GCT |
| 35 | 557 | 557 | WASTRES |
| 35 | 558 | 558 | TGGGCATCTACCCGCGAATCC |
| 35 | 559 | 559 | QQYYSSAF |
| 35 | 560 | 560 | CAGCAATATTATAGTAGTGCTTTT |
| 36 | 561 | 561 | CAGGTCCAGCTGGTGCAGTCTGGACCTGAAGTGAAGAAGCCTGGGGC |
| | | | CTCAGTGACGATCTCCTGTCAGGCCTCTGGGTACATCTTCAATCACTA |
| | | | CTCTATCACCTGGGTGCGACAGGCCCCTGGACAAGGGACTGAGTGGA |
| | | | TGGGGTGGATCAGCGCCTATCACGGTAAGACGGAATATTCAGGGAAA |
| | | | TTCCACGGCAGAGTCACCCTGACCACAGACACAGGCACGCGGACAGC |
| | | | CTTCTTGGAACTTAGGGACCTGACATCTGACGACACGGCCATTTATTA |
| | | | TTGTGCGCGAGATGTCCCGGTCATGGGAGCCGCATTTTTGGACTACTG |
| | | | GGGCCAGGGAACCCTGGTCACCGTCTCCTCA |
| 36 | 562 | 562 | QVQLVQSGPEVKKPGASVTISCQASGYIFNHYSITWVRQAPGQGTEWMG |
| | | | WISAYHGKTEYSGKFHGRVTLTTDTGTRTAFLELRDLTSDDTAIYYCAR |
| | | | DVPVMGAAFLDYWGQGTLVTVSS |
| 36 | 563 | 563 | YIFNHYSIT |
| 36 | 564 | 564 | TACATCTTCAATCACTACTCTATCACC |
| 36 | 565 | 565 | WISAYHGKTEYSGKFHG |
| 36 | 566 | 566 | TGGATCAGCGCCTATCACGGTAAGACGGAATATTCAGGGAAATTCCA |
| | | | CGGC |
| 36 | 567 | 567 | ARDVPVMGAAFLDY |
| 36 | 568 | 568 | GCGCGAGATGTCCCGGTCATGGGAGCCGCATTTTTGGACTAC |
| 36 | 569 | 569 | GAAATTGTGTTGACACAGTCTCCACTCTCCCTGCCCGTCACCCTTGGA |
| | | | CAGCCGGCCTCCATCTCCTGCAGGTCTGGTCAAAGTCTCGAATTCAGT |
| | | | GATGGAAACACCTACTTGACTTGGTTTCAGCAGAGGCCAGGCCAATC |
| | | | TCCAAGGCGCCTAATTTTTAGGGGTTCTTACCGGGACTCTGGGGTCCC |
| | | | CGAAAGATTCAGCGGCAGTGGCTCAGGCACTTCTTTCACACTGACAA |
| | | | TCAGCAGGGTGGAGGCTGAGGATGTTGGGATTTATTTCTGCATGCAA |
| | | | GGTACACACTGGCCTCCGACGTTCGGCCAAGGGACCAAGCTGGAGAT |
| | | | CAAA |
| 36 | 570 | 570 | EIVLTQSPLSLPVTLGQPASISCRSGQSLEFSDGNTYLTWFQQRPGQSPRR |
| | | | LIFRGSYRDSGVPERFSGSGSGTSFTLTISRVEAEDVGIYFCMQGTHWPPT |
| | | | FGQGTKLEIK |
| 36 | 571 | 571 | RSGQSLEFSDGNTYLT |
| 36 | 572 | 572 | AGGTCTGGTCAAAGTCTCGAATTCAGTGATGGAAACACCTACTTGACT |
| 36 | 573 | 573 | RGSYRDS |
| 36 | 574 | 574 | AGGGGTTCTTACCGGGACTCT |
| 36 | 575 | 575 | MQGTHWPPT |
| 36 | 576 | 576 | ATGCAAGGTACACACTGGCCTCCGACG |
| 37 | 577 | 577 | CAGGTGCAGCTGGTGCAGTCTGGCCCTGCGCTGGTGAAACCCACGCA |
| | | | GACCCTCACACTGACCTGCACCTTCTCTGGGTTCTCACTCACCACTGC |
| | | | AAGAATGTGTGTGAGTTGGATCCGTCAGCCCCCAGGGAAGGCCCTGG |
| | | | AGTGGCTTGCACGCATTGATTGGGATGATGATAAATCCTACAGCACA |
| | | | TCTCTGAAGACCAGGCTCACCATCGCCAAGGACACATCCAAAAACCA |
| | | | GGTCGTCCTTACCATGACCAACATGGGCCCCGCGGACACAGCCACTT |
| | | | ATTACTGTGTACGGACTCCTATATATGCTAGTGGTGGTTATTACCTCT |
| | | | CCTACTTTGACTCCTGGGGCCAGGGAACCCTGGTCACCGTCTCCTCA |
| 37 | 578 | 578 | QVQLVQSGPALVKPTQTLTLTCTFSGFSLTTARMCVSWIRQPPGKALEW |
| | | | LARIDWDDDKSYSTSLKTRLTIAKDTSKNQVVLTMTNMGPADTATYYC |
| | | | VRTPIYASGGYYLSYFDSWGQGTLVTVSS |
| 37 | 579 | 579 | FSLTTARMCVS |
| 37 | 580 | 580 | TTCTCACTCACCACTGCAAGAATGTGTGTGAGT |
| 37 | 581 | 581 | RIDWDDDKSYSTSLKT |
| 37 | 582 | 582 | CGCATTGATTGGGATGATGATAAATCCTACAGCACATCTCTGAAGACC |
| 37 | 583 | 583 | VRTPIYASGGYYLSYFDS |
| 37 | 584 | 584 | GTACGGACTCCTATATATGCTAGTGGTGGTTATTACCTCTCCTACTTT |
| | | | GACTCC |
| 37 | 585 | 585 | GATATTGTGATGACGCAGTCTCCATCCTCCCTGTCTGCATCTGTCGGA |
| | | | GACAGCGTCACCATCACTTGCCGGGCAAGTCAGACTATTGCCAGCTA |
| | | | TGTGAATTGGTATCAGCACAAACCAGGGCAAGCCCCTAACCTCCTGA |
| | | | TCTATGCTGCATCCATTTTGCACAGTGGGGTCCCATCAAGGTTCAGAG |
| | | | GCGGTGGCTCTGGGACAGATTTCACTCTCACCATCAACAGTCTGCAAC |
| | | | CTGAAGATTTTGCAACTTACTACTGTCAACAGAGTTACAGTACCCCTT |
| | | | ACACTTTTGGCCAGGGGACCAAAGTGGATATCAAA |
| 37 | 586 | 586 | DIVMTQSPSSLSASVGDSVTITCRASQTIASYVNWYQHKPGQAPNLLIYA |
| | | | ASILHSGVPSRFRGGGSGTDFTLTINSLQPEDFATYYCQQSYSTPYTFGQG |
| | | | TKVDIK |
| 37 | 587 | 587 | RASQTIASYVN |
| 37 | 588 | 588 | CGGGCAAGTCAGACTATTGCCAGCTATGTGAAT |
| 37 | 589 | 589 | AASILHS |
| 37 | 590 | 590 | GCTGCATCCATTTTGCACAGT |
| 37 | 591 | 591 | QQSYSTPYT |
| 37 | 592 | 592 | CAACAGAGTTACAGTACCCCTTACACT |
| 38 | 593 | 593 | CAGGTGCAGCTGGTGGAGTCTGGTCCTACGCTGGTGAAACCCACACA |
| | | | GACCCTCTCGCTGACCTGCACCTTCTCTGGGTTCTCACTCACCACTCG |
| | | | TGGAGTGGGTGTGGGCTGGATCCGTCAGCCCCCAGGAAAGGCCCTGG |
| | | | AGTGGCTTGGATTCACTTATTGGGATGGTGATGACCGCTACAGCCCAT |
| | | | CTCTGAGGAACAGAGTCTCCATCGCCAAGGACACCTCCAAAAACCAG |
| | | | GTGGTCCTTACACTGACCAACATGGACCCTGTGGACACAGCCACGTA |
| | | | TTTTTGTGTACACAGCGATCGCTATGACAGGGGTGGTTATTACTTATA |
| | | | CTTCTTTGACTACTGGGGCCCGGGAACCCTGGTCACCGTCTCCTCA |
| 38 | 594 | 594 | QVQLVESGPTLVKPTQTLSLTCTFSGFSLTTRGVGVGWIRQPPGKALEWL |
| | | | GFTYWDGDDRYSPSLRNRVSIAKDTSKNQVVLTLTNMDPVDTATYFCV |
| | | | HSDRYDRGGYYLYFFDYWGPGTLVTVSS |
| 38 | 595 | 595 | FSLTTRGVGVG |
| 38 | 596 | 596 | TTCTCACTCACCACTCGTGGAGTGGGTGTGGGC |
| 38 | 597 | 597 | FTYWDGDDRYSPSLRN |
| 38 | 598 | 598 | TTCACTTATTGGGATGGTGATGACCGCTACAGCCCATCTCTGAGGAAC |
| 38 | 599 | 599 | VHSDRYDRGGYYLYFFDY |
| 38 | 600 | 600 | GTACACAGCGATCGCTATGACAGGGGTGGTTATTACTTATACTTCTTT |
| | | | GACTAC |
| 38 | 601 | 601 | GACATCCGAGTCACCCAGTCTCCATCCTCCCTGTCTGCGTCTGTGGGG |
| | | | GACAGAGTCTCCATCAGTTGCCGGGCAAGTCAGACCATTGCCAGTTA |
| | | | TGTAAATTGGTATCAGCAGAGACCAGGGAAAGCCCCTCAACTCCTGA |
| | | | TCTTTGCTGCATCCCATTTGCAGACTGGGGTCCCATCAAGATTCAGTG |
| | | | GCAGGGGCTCTGGGACAGATTTCACTCTCACCATCACCTCTCTGCAAC |
| | | | CTGAAGATTTTGCAACTTACTACTGTCAACAGAGTTACACTTCCCCGT |
| | | | ACACTTTTGGCCAGGGGACCAAGGTGGAAATCAAA |
| 38 | 602 | 602 | DIRVTQSPSSLSASVGDRVSISCRASQTIASYVNWYQQRPGKAPQLLIFAA |
| | | | SHLQTGVPSRFSGRGSGTDFTLTITSLQPEDFATYYCQQSYTSPYTFGQGT |
| | | | KVEIK |
| 38 | 603 | 603 | RASQTIASYVN |
| 38 | 604 | 604 | CGGGCAAGTCAGACCATTGCCAGTTATGTAAAT |
| 38 | 605 | 605 | AASHLQT |
| 38 | 606 | 606 | GCTGCATCCCATTTGCAGACT |
| 38 | 607 | 607 | QQSYTSPYT |
| 38 | 608 | 608 | CAACAGAGTTACACTTCCCCGTACACT |
| 39 | 609 | 609 | GAGGTGCAGCTGGTGGAGTCTGGTCCTACGCTGGTGAAACCCACACA |
| | | | GACCCTCACGCTGACCTGCTCCCTCTCTGGGTTCTCACTCACCACTCG |
| | | | TGGGGTGGGTGTGGGCTGGATCCGCCAGCCCCCAGGAAAGGCCCCGG |
| | | | AGTGCCTTGGATTCGTTTATTGGGATGATGATAACCGCTACAGCCCAT |
| | | | CTCTGAGGGGCAGACTCACCATCTCCAAGGACACGTCCAAGAACCAG |
| | | | GTGGTCCTTACACTGACCAACATGGACCCTTTGGACACAGCCACCTAT |
| | | | TACTGTGTTCACAGCGATCTCTATGATAGAGGTGGTTATTACTTATTC |
| | | | TACTTTGACGACTGGGGCCAGGGAACCCTGGTCACCGTCTCCTCA |
| 39 | 610 | 610 | EVQLVESGPTLVKPTQTLTLTCSLSGFSLTTRGVGVGWIRQPPGKAPECL |
| | | | GFVYWDDDNRYSPSLRGRLTISKDTSKNQVVLTLTNMDPLDTATYYCV |
| | | | HSDLYDRGGYYLFYFDDWGQGTLVTVSS |
| 39 | 611 | 611 | FSLTTRGVGVG |
| 39 | 612 | 612 | TTCTCACTCACCACTCGTGGGGTGGGTGTGGGC |
| 39 | 613 | 613 | FVYWDDDNRYSPSLRG |
| 39 | 614 | 614 | TTCGTTTATTGGGATGATGATAACCGCTACAGCCCATCTCTGAGGGGC |
| 39 | 615 | 615 | VHSDLYDRGGYYLFYFDD |
| 39 | 616 | 616 | GTTCACAGCGATCTCTATGATAGAGGTGGTTATTACTTATTCTACTTT |
| | | | GACGAC |
| 39 | 617 | 617 | GACATCCAGGTGACCCAGTCTCCATCCTCCCTGTCTGCATCTGTGGGG |
| | | | GACAGAGTCACCATCACTTGCCGGGCAAGTCAGCCCATTGCCAGTTA |
| | | | TTTAAATTGGTATCAGCAGAAACCAGGGCAAGCCCCTAAACTCCTCA |
| | | | TCTATGCTGCATCCATGTTGCAGAGTGGGGCCCCATCAAAATTCAGTG |
| | | | GCCGGGGATCTGGGACAGATTTCACTCTCACCATCACCACTCTACAAC |
| | | | CTGAAGATTTTGCAACTTACTACTGTCAACAGAGTTACACTTTCCCGT |
| | | | ACACTTTTGGCCAGGGGACCAAGGTGGAAATCAAA |
| 39 | 618 | 618 | DIQVTQSPSSLSASVGDRVTITCRASQPIASYLNWYQQKPGQAPKLLIYA |
| | | | ASMLQSGAPSKFSGRGSGTDFTLTITTLQPEDFATYYCQQSYTFPYTFGQ |
| | | | GTKVEIK |
| 39 | 619 | 619 | RASQPIASYLN |
| 39 | 620 | 620 | CGGGCAAGTCAGCCCATTGCCAGTTATTTAAAT |
| 39 | 621 | 621 | AASMLQS |
| 39 | 622 | 622 | GCTGCATCCATGTTGCAGAGT |
| 39 | 623 | 623 | QQSYTFPYT |
| 39 | 624 | 624 | CAACAGAGTTACACTTTCCCGTACACT |
| 40 | 625 | 625 | GAGGTGCAGCTGGTGGAGTCTGGGGGAGGCTTGGTCAAGCCTGGAGG |
| | | | GTCCCTGAGACTCTCCTGTGCAGCCTCTGGATTCACCTTCAGTGACTA |
| | | | CTACATGAGCTGGATCCGCCAGGCTCCAGGGAAGGGACTGGAGTGGG |
| | | | TTTCATATATTAGTATTAGTAGTAGTTACACAGACTACGCAGACTCTG |
| | | | TGAAGGGCCGATTCACCATCTCCAGAGACAACGCCAAGAACTCACTG |
| | | | TATCTGCAAATGAACAGCCTGAGAGCCGAGGACACGGCCGTGTATTA |
| | | | CTGTGCGAGAGATCAACGAGACCAAGCAGTGGCTGGTCGGTGGTTCG |
| | | | ACCCCTGGGGCCAGGGAACCCTGGTCACCGTCTCCTCA |
| 40 | 626 | 626 | EVQLVESGGGLVKPGGSLRLSCAASGFTFSDYYMSWIRQAPGKGLEWVS |
| | | | YISISSSYTDYADSVKGRFTISRDNAKNSLYLQMNSLRAEDTAVYYCARD |
| | | | QRDQAVAGRWFDPWGQGTLVTVSS |
| 40 | 627 | 627 | FTFSDYYMS |
| 40 | 628 | 628 | TTCACCTTCAGTGACTACTACATGAGC |
| 40 | 629 | 629 | YISISSSYTDYADSVKG |
| 40 | 630 | 630 | TATATTAGTATTAGTAGTAGTTACACAGACTACGCAGACTCTGTGAAG |
| | | | GGC |
| 40 | 631 | 631 | ARDQRDQAVAGRWFDP |
| 40 | 632 | 632 | GCGAGAGATCAACGAGACCAAGCAGTGGCTGGTCGGTGGTTCGACCCC |
| 40 | 633 | 633 | CAGTCTGTGGTGACGCAGCCGCCCTCAGTGTCTGGGGCCCCAGGGCA |
| | | | GAGGGTCACCATCTCCTGCACTGGGAGCAGCTCCAACATCGGGGCAG |
| | | | GTTTTGATGTACACTGGTACCAGCAGGTTCCAGGAACAGCCCCCAAA |
| | | | CTCCTCATCTATGCTAACACCAATCGGCCCTCAGGGGTCCCAGACCGA |
| | | | TTCTCTGGCTCCAAGTCTGGCACCTCAGCCTCCCTGGCCATCACTGGG |
| | | | CTCAAGGCTGAGGATGAGGCTGATTATTACTGCCAGTCCTATGACAA |
| | | | CAGCCTGAGTGGTTCGGCGGTCTTCGGCGGAGGGACCAAGGTCACCG |
| | | | TCCTA |
| 40 | 634 | 634 | QSVVTQPPSVSGAPGQRVTISCTGSSSNIGAGFDVHWYQQVPGTAPKLLI |
| | | | YANTNRPSGVPDRFSGSKSGTSASLAITGLKAEDEADYYCQSYDNSLSGS |
| | | | AVFGGGTKVTVL |
| 40 | 635 | 635 | TGSSSNIGAGFDVH |
| 40 | 636 | 636 | ACTGGGAGCAGCTCCAACATCGGGGCAGGTTTTGATGTACAC |
| 40 | 637 | 637 | ANTNRPS |
| 40 | 638 | 638 | GCTAACACCAATCGGCCCTCA |
| 40 | 639 | 639 | QSYDNSLSGSAV |
| 40 | 640 | 640 | CAGTCCTATGACAACAGCCTGAGTGGTTCGGCGGTC |
| 41 | 641 | 641 | CAGGTGCAGCTGGTGCAATCTGGTTCTGAGGTGAAGCAGCCTGGGGC |
| | | | CTCAGTGAAGGTCTCCTGCAAGGCCTCTGGATACACCTTCAGCGCCTA |
| | | | CCATCTGCACTGGGTGCGCCAGGCCCCCGGACAAGGGCTTCAGTGGC |
| | | | TGGGCAGGATCAACCCTAACAGTGGTGCCACAAGCGTTGCACATAAC |
| | | | TTTCAGGGCAGGGTCACCTTGACCACGGACACGTCCATCAGCACAGC |
| | | | CTACATGGAGCTGAGCAGCCTGACGTCTGACGACAGTGCCGTGTATT |
| | | | ACTGCGCGAGAACTATGTGGCGGTGGCTGGTCGAGGGGGGCTTTGAG |
| | | | AACTGGGGCCAGGGAACCCTGGTCACCGTCTCCTCA |
| 41 | 642 | 642 | QVQLVQSGSEVKQPGASVKVSCKASGYTFSAYHLHWVRQAPGQGLQW |
| | | | LGRINPNSGATSVAHNFQGRVTLTTDTSISTAYMELSSLTSDDSAVYYCA |
| | | | RTMWRWLVEGGFENWGQGTLVTVSS |
| 41 | 643 | 643 | YTFSAYHLH |
| 41 | 644 | 644 | TACACCTTCAGCGCCTACCATCTGCAC |
| 41 | 645 | 645 | RINPNSGATSVAHNFQG |
| 41 | 646 | 646 | AGGATCAACCCTAACAGTGGTGCCACAAGCGTTGCACATAACTTTCA |
| | | | GGGC |
| 41 | 647 | 647 | ARTMWRWLVEGGFEN |
| 41 | 648 | 648 | GCGAGAACTATGTGGCGGTGGCTGGTCGAGGGGGGCTTTGAGAAC |
| 41 | 649 | 649 | GACATCCGGATGACCCAGTCTCCACTCTCCCTGCCCGTCACCCCTGGA |
| | | | GAGCCGGCCTCCATCTCCTGCAGGTCTAGTCAGAGCCTCCTGCATAGT |
| | | | AATGGAGACAACTATTTGGATTGGTACCTGCAGAAGCCAGGGCAGTC |
| | | | TCCACAGGTCCTGATCTATCTGGGTTCTAATCGGGCCTCCGGGGTCCC |
| | | | TGACAGGTTCAGTGGCAGTGGATCAGGCACAGATTTTACACTGAAAA |
| | | | TCAGCAGAGTGGAGGCTGAGGATGTTGGGGTTTATTACTGCATGCAA |
| | | | GCTCTACAAACTCCGCTCACTTTCGGCGGAGGGACCAAGGTGGAAAT |
| | | | CAAA |
| 41 | 650 | 650 | DIRMTQSPLSLPVTPGEPASISCRSSQSLLHSNGDNYLDWYLQKPGQSPQ |
| | | | VLIYLGSNRASGVPDRFSGSGSGTDFTLKISRVEAEDVGVYYCMQALQTP |
| | | | LTFGGGTKVEIK |
| 41 | 651 | 651 | RSSQSLLHSNGDNYLD |
| 41 | 652 | 652 | AGGTCTAGTCAGAGCCTCCTGCATAGTAATGGAGACAACTATTTGGAT |
| 41 | 653 | 653 | LGSNRAS |
| 41 | 654 | 654 | CTGGGTTCTAATCGGGCCTCC |
| 41 | 655 | 655 | MQALQTPLT |
| 41 | 656 | 656 | ATGCAAGCTCTACAAACTCCGCTCACT |
| 42 | 657 | 657 | CAGGTCCAGCTGGTGCAGTCTGGGGCTGAGGTGAAGAAGCCGGGGTC |
| | | | CTCGATGAGCATCTCCTGTCGGGCTTCTGGAGGCTCCTTCAACAACCA |
| | | | AGCTATACACTGGATCCGCCAGGCCCCTGGAGAAGGACTTGAGTGGA |
| | | | TGGGAAATATCATCCCTAATTTCGGATCTCAAAACTACGCGCCGGAA |
| | | | TTCGTGGGCAGGGTCAGCTTCAATGCGGACGCTTCCGCTGGCACTGCC |
| | | | TACATGGACTTGAGTGATCTGACATCTCAAGACACGGCCGTCTATTAC |
| | | | TGTGCGACAGCCGGGTGGTTCGGGGAATTGGTGCGCTTTGACTCCTG |
| | | | GGGCCAGGGAACCCTGGTCACCGTCTCCTCA |
| 42 | 658 | 658 | QVQLVQSGAEVKKPGSSMSISCRASGGSFNNQAIHWIRQAPGEGLEWMG |
| | | | NIIPNFGSQNYAPEFVGRVSFNADASAGTAYMDLSDLTSQDTAVYYCAT |
| | | | AGWFGELVRFDSWGQGTLVTVSS |
| 42 | 659 | 659 | GSFNNQAIH |
| 42 | 660 | 660 | GGCTCCTTCAACAACCAAGCTATACAC |
| 42 | 661 | 661 | NIIPNFGSQNYAPEFVG |
| 42 | 662 | 662 | AATATCATCCCTAATTTCGGATCTCAAAACTACGCGCCGGAATTCGTG |
| | | | GGC |
| 42 | 663 | 663 | ATAGWFGELVRFDS |
| 42 | 664 | 664 | GCGACAGCCGGGTGGTTCGGGGAATTGGTGCGCTTTGACTCC |
| 42 | 665 | 665 | GATATTGTGATGACGCAGTCTCCAGCCACCCTGTCTGTGTCTCCAGGG |
| | | | GGAAGGGCCACCCTCTCCTGCAGGGCCAGTGAGACTATTACCACTAA |
| | | | CTTAGCCTGGTACCAGCAGAAGCCTGGCCAGGCTCCCAGGCTCCTCA |
| | | | TCTATGGTGCGTCCACCAGGGCCACTGGTATCCCAGCCAGGTTCAGTG |
| | | | GCAGTGGGTCAGGGACAGAGTTCACTCTCACCATCAACAGCCTGCAG |
| | | | TCTGAGGATTTTGCAGTTTATTACTGTCAGCAGTATAATAACTGGCCT |
| | | | CCTCTCACTTTCGGCGGAGGGACCAAGCTGGAGATCAAA |
| 42 | 666 | 666 | DIVMTQSPATLSVSPGGRATLSCRASETITTNLAWYQQKPGQAPRLLIYG |
| | | | ASTRATGIPARFSGSGSGTEFTLTINSLQSEDFAVYYCQQYNNWPPLTFG |
| | | | GGTKLEIK |
| 42 | 667 | 667 | RASETITTNLA |
| 42 | 668 | 668 | AGGGCCAGTGAGACTATTACCACTAACTTAGCC |
| 42 | 669 | 669 | GASTRAT |
| 42 | 670 | 670 | GGTGCGTCCACCAGGGCCACT |
| 42 | 671 | 671 | QQYNNWPPLT |
| 42 | 672 | 672 | CAGCAGTATAATAACTGGCCTCCTCTCACT |
| 43 | 673 | 673 | CAGGTGCAGCTACAGCAGTGGGGCGCAGGACTGGTGAAGCCTTCGGA |
| | | | GACCCTGTCCCTCACCTGCGCTGTGTCTGGTGGGTCCTTCAGGGGTTA |
| | | | CCAGTGGAACTGGTTCCGCCAGCCCCCCGGGAAGGGTCTGGAGTGGA |
| | | | TTGGGGAAATCAATCATGGTGAATACACCCACTACAACGCGTCCCTC |
| | | | AAGAGTCGCGTCAGTTTATCTATAGACACGTCCAAGAACCAGTTCTCC |
| | | | CTTAATCTGACCTCTGTGACCGCCGCGGACACGGCTATGTATTTTTGT |
| | | | GCGAGAGCCTCGAGTGGGACCTATAACTTCGAGTACTGGTTCGACCC |
| | | | CTGGGGCCAGGGAACCCTGGTCACCGTCTCCTCA |
| 43 | 674 | 674 | QVQLQQWGAGLVKPSETLSLTCAVSGGSFRGYQWNWFRQPPGKGLEWI |
| | | | GEINHGEYTHYNASLKSRVSLSIDTSKNQFSLNLTSVTAADTAMYFCARA |
| | | | SSGTYNFEYWFDPWGQGTLVTVSS |
| 43 | 675 | 675 | GSFRGYQWN |
| 43 | 676 | 676 | GGGTCCTTCAGGGGTTACCAGTGGAAC |
| 43 | 677 | 677 | EINHGEYTHYNASLKS |
| 43 | 678 | 678 | GAAATCAATCATGGTGAATACACCCACTACAACGCGTCCCTCAAGAGT |
| 43 | 679 | 679 | ARASSGTYNFEYWFDP |
| 43 | 680 | 680 | GCGAGAGCCTCGAGTGGGACCTATAACTTCGAGTACTGGTTCGACCCC |
| 43 | 681 | 681 | TCCTATGTGCTGACACAGCCACCCTCGGTGTCAGTGGCCCCAGGAAA |
| | | | GACGGCCTGGCTTACCTGTGGGGGAAACAACATTGGAAATAAAAGAG |
| | | | TGCACTGGTACCAGCAGAAGCCAGGCCAGGCCCCTGTGCTGGTCGTG |
| | | | TATGATGATTACGGCCGGCCCTCAGGGACCTCTGAGCGAGTCTCTGG |
| | | | CTCCAACTCTGGGAACACGGCCACCCTGACCATCAGCAGGGTCGAAG |
| | | | CCGGGGATGAGGCCGAGTATTATTGTCAGGTGTGGGATGATCCCAGT |
| | | | GATCATGCGGTGTTCGGCGGAGGCACCCAGCTGACCGTCCTC |
| 43 | 682 | 682 | SYVLTQPPSVSVAPGKTAWLTCGGNNIGNKRVHWYQQKPGQAPVLVVY |
| | | | DDYGRPSGTSERVSGSNSGNTATLTISRVEAGDEAEYYCQVWDDPSDHA |
| | | | VFGGGTQLTVL |
| 43 | 683 | 683 | GGNNIGNKRVH |
| 43 | 684 | 684 | GGGGGAAACAACATTGGAAATAAAAGAGTGCAC |
| 43 | 685 | 685 | DDYGRPS |
| 43 | 686 | 686 | GATGATTACGGCCGGCCCTCA |
| 43 | 687 | 687 | QVWDDPSDHAV |
| 43 | 688 | 688 | CAGGTGTGGGATGATCCCAGTGATCATGCGGTG |
| 44 | 689 | 689 | CAGGTCCAGCTGGTGCAGTCTGGGGGACGACTGGTCAAGCCTGGGGG |
| | | | GTCCCTGAGACTCTCCTGTGGAATGTCTGGATTCGGCTTCAGTAGTTA |
| | | | TAGAATGAATTGGGTCCGCCAGGCTCCAGGGAAGGGACTGGAGTGGA |
| | | | TCTCATCGATTAGTGCTAGTAGTAGTTATACAGACTACGCGAATTCAG |
| | | | TGAAGGGCCGATTCACCATCTCCAGAGACGGCGCCAATTTGTTTCTGC |
| | | | AAATGAACAGCCTGAGAGTCGAGGACACGGCTGTGTATTATTGTGCG |
| | | | AGAGATTGGGGGGGACATTCCATTTTTGGAGCGGTCCAAGACCTCTG |
| | | | GGGCCAGGGAACCCTGGTCACCGTCTCCTCA |
| 44 | 690 | 690 | QVQLVQSGGRLVKPGGSLRLSCGMSGFGFSSYRMNWVRQAPGKGLEWI |
| | | | SSISASSSYTDYANSVKGRFTISRDGANLFLQMNSLRVEDTAVYYCARD |
| | | | WGGHSIFGAVQDLWGQGTLVTVSS |
| 44 | 691 | 691 | FGFSSYRMN |
| 44 | 692 | 692 | TTCGGCTTCAGTAGTTATAGAATGAAT |
| 44 | 693 | 693 | SISASSSYTDYANSVKG |
| 44 | 694 | 694 | TCGATTAGTGCTAGTAGTAGTTATACAGACTACGCGAATTCAGTGAA |
| | | | GGGC |
| 44 | 695 | 695 | ARDWGGHSIFGAVQDL |
| 44 | 696 | 696 | GCGAGAGATTGGGGGGGACATTCCATTTTTGGAGCGGTCCAAGACCTC |
| 44 | 697 | 697 | CAGTCTGTGCTGACGCAGCCGCCCTCAGTGTCTGGGGCCCCTGGGCA |
| | | | GAGGGTCACCATCTCCTGCTCTGGGAGCAGTTCCAACATCGGGGCAG |
| | | | GTTATGATGTCCACTGGTACCAGCAGCTTCCAGGAACAGCCCCCAAA |
| | | | CTCCTCATCTATGGTAACACCAATCGGCCCTCAGGGGTCCCTGACCGA |
| | | | TTCTCTGGCTCCAAGTCTGGCACGTCAGCCTCCCTGGCCATCACTGGC |
| | | | CTCCAGGCCGAGGATGAGGCTGATTATTACTGCCAGTCCTATGACAG |
| | | | AAGCCTGAGTCAGGTCTTCGGAGCTGGGACCAAGGTGACCGTCCTA |
| 44 | 698 | 698 | QSVLTQPPSVSGAPGQRVTISCSGSSSNIGAGYDVHWYQQLPGTAPKLLI |
| | | | YGNTNRPSGVPDRFSGSKSGTSASLAITGLQAEDEADYYCQSYDRSLSQV |
| | | | FGAGTKVTVL |
| 44 | 699 | 699 | SGSSSNIGAGYDVH |
| 44 | 700 | 700 | TCTGGGAGCAGTTCCAACATCGGGGCAGGTTATGATGTCCAC |
| 44 | 701 | 701 | GNTNRPS |
| 44 | 702 | 702 | GGTAACACCAATCGGCCCTCA |
| 44 | 703 | 703 | QSYDRSLSQV |
| 44 | 704 | 704 | CAGTCCTATGACAGAAGCCTGAGTCAGGTC |
| 45 | 705 | 705 | CAGGTCACCTTGAAGGAGTCTGGTCCTGCGCTGGTGAGACCCAAACA |
| | | | GACCCTCACTCTGACCTGCTCCTTCTCCGGCTTCTCACTCGACACTCA |
| | | | AAGAACGGGTGTGAATTGGATCCGTCAGTCCCCAGGGAAGGCCCTGG |
| | | | AGTGGCTTGCACGGATTGATTGGGATGGCAATATTTACTCCAGCACCT |
| | | | CTGTGAGGACCAAACTCAGCATCTCCAAGGGCACCTCCAAAAACCAG |
| | | | GTGGTCCTTACAATGACCGACGTGGACCCTGTGGACACAGCCACCTA |
| | | | TTACTGTGCACGGACTCTTTACTATACTTCTGGTGGTTATTACTTGAAC |
| | | | CTCTTTGACTACTGGGGCCAAGGAACCCTGGTCACCGTCTCCTCA |
| 45 | 706 | 706 | QVTLKESGPALVRPKQTLTLTCSFSGFSLDTQRTGVNWIRQSPGKALEWL |
| | | | ARIDWDGNIYSSTSVRTKLSISKGTSKNQVVLTMTDVDPVDTATYYCAR |
| | | | TLYYTSGGYYLNLFDYWGQGTLVTVSS |
| 45 | 707 | 707 | FSLDTQRTGVN |
| 45 | 708 | 708 | TTCTCACTCGACACTCAAAGAACGGGTGTGAAT |
| 45 | 709 | 709 | RIDWDGNIYSSTSVRT |
| 45 | 710 | 710 | CGGATTGATTGGGATGGCAATATTTACTCCAGCACCTCTGTGAGGACC |
| 45 | 711 | 711 | ARTLYYTSGGYYLNLFDY |
| 45 | 712 | 712 | GCACGGACTCTTTACTATACTTCTGGTGGTTATTACTTGAACCTCTTTG |
| | | | ACTAC |
| 45 | 713 | 713 | GAAATTGTGATGACGCAGTCTCCACCCTCCCTGTCTGCCTCTGTTGGG |
| | | | GACAGAGTCACCATCACTTGCCGGGCAAGTCAGACAATTCCCAGCTA |
| | | | TGTCAATTGGTATCAGCAGATATCAGGGAAAGCCCCTCGCCTCCTGAT |
| | | | CTATGCTGCCTCACTTTTGCAAAGTGGGGTCCCATCAAGGTTCAGTGG |
| | | | CAGCGGATCTGGGACAGAGTTCAGTCTCACCATCAGCGGTCTGCGAC |
| | | | CTGAGGATTTTGGCACTTACTACTGTCAACAGAGTTACAGTTCCACTC |
| | | | CCACTTTCGGCCAGGGGACACGACTGGAGATTAAA |
| 45 | 714 | 714 | EIVMTQSPPSLSASVGDRVTITCRASQTIPSYVNWYQQISGKAPRLLIYAA |
| | | | SLLQSGVPSRFSGSGSGTEFSLTISGLRPEDFGTYYCQQSYSSTPTFGQGTR |
| | | | LEIK |
| 45 | 715 | 715 | RASQTIPSYVN |
| 45 | 716 | 716 | CGGGCAAGTCAGACAATTCCCAGCTATGTCAAT |
| 45 | 717 | 717 | AASLLQS |
| 45 | 718 | 718 | GCTGCCTCACTTTTGCAAAGT |
| 45 | 719 | 719 | QQSYSSTPT |
| 45 | 720 | 720 | CAACAGAGTTACAGTTCCACTCCCACT |
| 46 | 721 | 721 | GAGGTGCAGCTGGTGGAGTCTGGGGCTGAGGTGAAGAGGCCTGGGTC |
| | | | CTCGGTGAAGGTCTCCTGTAAGGTTGTCGGAGGCAGTTTCAGCAACT |
| | | | ATGCTATCAGCTGGGTGCGACAGGCCCCTGGACAAGGGCCTGAGTAT |
| | | | CTGGGAGGGATCATCCCCGCCTTTAGGACAGCAAAATATGCAAAGAA |
| | | | ATTCCAGGACAGACTCACAATTACCGCGGACGAATCTACGAGCACTG |
| | | | CCTACATGGAAATGAGGGGCCTGACATCTGACGACACGGGCCTATAT |
| | | | TATTGTGCGAGGCCTGAAGGAGACTTTGGGGATTTGAAGTGGCTACG |
| | | | ATCGCCCTTTGACTACTGGGGCCAGGGAACCCTGGTCACCGTCTCCTCA |
| 46 | 722 | 722 | EVQLVESGAEVKRPGSSVKVSCKVVGGSFSNYAISWVRQAPGQGPEYLG |
| | | | GIIPAFRTAKYAKKFQDRLTITADESTSTAYMEMRGLTSDDTGLYYCARP |
| | | | EGDFGDLKWLRSPFDYWGQGTLVTVSS |
| 46 | 723 | 723 | GSFSNYAIS |
| 46 | 724 | 724 | GGCAGTTTCAGCAACTATGCTATCAGC |
| 46 | 725 | 725 | GIIPAFRTAKYAKKFQD |
| 46 | 726 | 726 | GGGATCATCCCCGCCTTTAGGACAGCAAAATATGCAAAGAAATTCCA |
| | | | GGAC |
| 46 | 727 | 727 | ARPEGDFGDLKWLRSPFDY |
| 46 | 728 | 728 | GCGAGGCCTGAAGGAGACTTTGGGGATTTGAAGTGGCTACGATCGCC |
| | | | CTTTGACTAC |
| 46 | 729 | 729 | GAAATTGTGTTGACGCAGTCTCCAGCCACCCTGTCTGTGTCTCCAGGG |
| | | | CAAAGAGTCACCCTTTCCTGCAGGGCCAGTCAGGGTGTGAGCATCAA |
| | | | CTTAGCCTGGTACCAGCAGAAACCTGGCCAGCCTCCCAGGCTCCTCAT |
| | | | CTATGGTGCATCCACCCGGGCCACTGATATCCCAGCCAGGTTCAGTG |
| | | | GCAGTGGGTCTGGGACAGACTTCACTCTCACCATCAGCAGCCTGCAG |
| | | | TCTGAAGATTTTGCAGTTTATTATTGTCAGCAGTATGATGACTGGCCT |
| | | | CCCCAGCTCACTTTCGGCCCTGGGACCAAGCTGGAGATCAAA |
| 46 | 730 | 730 | EIVLTQSPATLSVSPGQRVTLSCRASQGVSINLAWYQQKPGQPPRLLIYG |
| | | | ASTRATDIPARFSGSGSGTDFTLTISSLQSEDFAVYYCQQYDDWPPQLTF |
| | | | GPGTKLEIK |
| 46 | 731 | 731 | RASQGVSINLA |
| 46 | 732 | 732 | AGGGCCAGTCAGGGTGTGAGCATCAACTTAGCC |
| 46 | 733 | 733 | GASTRAT |
| 46 | 734 | 734 | GGTGCATCCACCCGGGCCACT |
| 46 | 735 | 735 | QQYDDWPPQLT |
| 46 | 736 | 736 | CAGCAGTATGATGACTGGCCTCCCCAGCTCACT |
| 47 | 737 | 737 | CAGGTGCAGCTGCAGGAGTCGGGCCCAGGACTAGTGAAGCCTTCGGA |
| | | | GACCCTGTCCCTCACCTGCACTGTCTCTGGTGGCTCCATCAATAACTA |
| | | | CTTCTGGAGCTGGATCCGGCAGCCCCCAGGGAAGGGACTGGAGTGGC |
| | | | TTGGATATATCTACAACAGTGGGAGCACCTACTACAACCCCTCCCTCA |
| | | | ACAGTCGAGTCACCATCTCATTACAAAAGTCCAAGAACCAGTTCTCC |
| | | | CTGCACCTGACGTCCATGACCGCCGCCGATACGGCCGTGTATTTCTGT |
| | | | GCGAGACATCCAAGTGTGATCTACGGGACTTTCGGCGCCAACGGGGG |
| | | | GCCAAACTGGTTCGACCCCTGGGGCCAGGGAACCCTGGTCACCGTCT |
| | | | CCTCA |
| 47 | 738 | 738 | QVQLQESGPGLVKPSETLSLTCTVSGGSINNYFWSWIRQPPGKGLEWLG |
| | | | YIYNSGSTYYNPSLNSRVTISLQKSKNQFSLHLTSMTAADTAVYFCARHP |
| | | | SVIYGTFGANGGPNWFDPWGQGTLVTVSS |
| 47 | 739 | 739 | GSINNYFWS |
| 47 | 740 | 740 | GGCTCCATCAATAACTACTTCTGGAGC |
| 47 | 741 | 741 | YIYNSGSTYYNPSLNS |
| 47 | 742 | 742 | TATATCTACAACAGTGGGAGCACCTACTACAACCCCTCCCTCAACAGT |
| 47 | 743 | 743 | ARHPSVIYGTFGANGGPNWFDP |
| 47 | 744 | 744 | GCGAGACATCCAAGTGTGATCTACGGGACTTTCGGCGCCAACGGGGG |
| | | | GCCAAACTGGTTCGACCCC |
| 47 | 745 | 745 | CAGTCTGTTCTGACTCAGCCTGCCTCCGTGTCTGGGTCTCCTGGACAG |
| | | | TCGATCACCATCTCCTGCACTGGAACCAGCAGTGACGTTGGTGGTTAT |
| | | | AACTATGTCTCCTGGTACCAACAACACCCAGGCAAGGCCCCCAAACT |
| | | | CATGATTTTCGATGTCACTTATCGGCCCTCAGGGATTTCTAATCGCTT |
| | | | CTCTGGCTCCAAGTCTGGCAACACGGCCTCCCTGACCATCTCTGGGCT |
| | | | CCACTCTGAGGACGAGGCTGATTATTATTGCAGCTCATATACAGGCA |
| | | | GCAACACCGTGATTTTCGGCGGAGGGACCAAGCTGACCGTCCTA |
| 47 | 746 | 746 | QSVLTQPASVSGSPGQSITISCTGTSSDVGGYNYVSWYQQHPGKAPKLMI |
| | | | FDVTYRPSGISNRFSGSKSGNTASLTISGLHSEDEADYYCSSYTGSNTVIF |
| | | | GGGTKLTVL |
| 47 | 747 | 747 | TGTSSDVGGYNYVS |
| 47 | 748 | 748 | ACTGGAACCAGCAGTGACGTTGGTGGTTATAACTATGTCTCC |
| 47 | 749 | 749 | DVTYRPS |
| 47 | 750 | 750 | GATGTCACTTATCGGCCCTCA |
| 47 | 751 | 751 | SSYTGSNTVI |
| 47 | 752 | 752 | AGCTCATATACAGGCAGCAACACCGTGATT |
| 48 | 753 | 753 | CAGGTCCAGCTTGTACAGTCTGGGGCTGAAGTGAAGAAGCCTGGGGC |
| | | | CTCAGTGAGGGTCTCCTGCAAGGCTTCTGGCTACACCTTCAGCAGCTA |
| | | | CTATATTCACTGGGTGCGACAGGCCCCTGGACAAGGGCCTGAGTGGC |
| | | | TGGGATGGATCAACCCAAAGAGTGGTGACACAATCTATTCATATAAG |
| | | | TTTCAGGGCAGGGTCACCTTGACCAGGGAAACGTCAATCACCACAGC |
| | | | CTACATGGAGTTGACCAGTCTGAGATCTGACGACACGGCCGTCTATT |
| | | | ACTGTGCGCGAGTTACTTGGCAGTGGCTGGTCCTGGGGGGTTTTGACT |
| | | | ACTGGGGCCAGGGAACCCTGGTCACCGTCTCCTCA |
| 48 | 754 | 754 | QVQLVQSGAEVKKPGASVRVSCKASGYTFSSYYIHWVRQAPGQGPEWL |
| | | | GWINPKSGDTIYSYKFQGRVTLTRETSITTAYMELTSLRSDDTAVYYCAR |
| | | | VTWQWLVLGGFDYWGQGTLVTVSS |
| 48 | 755 | 755 | YTFSSYYIH |
| 48 | 756 | 756 | TACACCTTCAGCAGCTACTATATTCAC |
| 48 | 757 | 757 | WINPKSGDTIYSYKFQG |
| 48 | 758 | 758 | TGGATCAACCCAAAGAGTGGTGACACAATCTATTCATATAAGTTTCA |
| | | | GGGC |
| 48 | 759 | 759 | ARVTWQWLVLGGFDY |
| 48 | 760 | 760 | GCGCGAGTTACTTGGCAGTGGCTGGTCCTGGGGGGTTTTGACTAC |
| 48 | 761 | 761 | GATATTGTGCTGACTCAGTCTCCACTCTCCCTGCCCGTCACCCCTGGA |
| | | | GAGCCGGCCTCCATCTCCTGCAGGTCTAGTCTGAGCCTCCTGCATAGT |
| | | | AATGGAGACAACTATTTGGATTGGTACCTGCAGAAGCCAGGGCAGTC |
| | | | TCCACAGCTCCTGATCTATTTGGGTTCTAATCGGGCCTCCGGGGTCCC |
| | | | TGACAGGTTCAGTGGCAGTGGATCAGGCACAGATTTTACACTGAAAA |
| | | | TCAGCCGAGTGGAGGCTGAGGATGTTGGGGTTTATTACTGCATGCAA |
| | | | GCTCTACACACTCCCCTCACTTTCGGCGGAGGGACCAAGCTGGAGAT |
| | | | CAAA |
| 48 | 762 | 762 | DIVLTQSPLSLPVTPGEPASISCRSSLSLLHSNGDNYLDWYLQKPGQSPQL |
| | | | LIYLGSNRASGVPDRFSGSGSGTDFTLKISRVEAEDVGVYYCMQALHTPL |
| | | | TFGGGTKLEIK |
| 48 | 763 | 763 | RSSLSLLHSNGDNYLD |
| 48 | 764 | 764 | AGGTCTAGTCTGAGCCTCCTGCATAGTAATGGAGACAACTATTTGGAT |
| 48 | 765 | 765 | LGSNRAS |
| 48 | 766 | 766 | TTGGGTTCTAATCGGGCCTCC |
| 48 | 767 | 767 | MQALHTPLT |
| 48 | 768 | 768 | ATGCAAGCTCTACACACTCCCCTCACT |
| 49 | 769 | 769 | GAGGTGCAGCTGGTGGAGTCTGGGGGAGGCTTGGTCCAGCCTGGGGG |
| | | | GTCCCTGAAACTCTCCTGTACTTCCTCTGGGCTCGCCTTCAGTGGCTCT |
| | | | GCTATACACTGGGTCCGCCAGGCTTCCGGGAAAGGGCTGGAGTGGGT |
| | | | TGGCCGTATTAGAAGCAAACCTAACAGTTACGCGACAGAATATGCTG |
| | | | CGTCGGTGAAGGGGAGGTTCACCATCTCCAGAGATGATTCACAGAAC |
| | | | ACGGCGTATCTGCAAATGAACAGCCTGAAAGCCGAGGACACGGCCCT |
| | | | GTATTACTGTACTTTAGGATATTGTAGTGGTGATAGCTGCTCCTCTCTT |
| | | | AGGGACTACTGGGGCCAGGGAACCCTGGTCACCGTCTCCTCA |
| 49 | 770 | 770 | EVQLVESGGGLVQPGGSLKLSCTSSGLAFSGSAIHWVRQASGKGLEWVG |
| | | | RIRSKPNSYATEYAASVKGRFTISRDDSQNTAYLQMNSLKAEDTALYYC |
| | | | TLGYCSGDSCSSLRDYWGQGTLVTVSS |
| 49 | 771 | 771 | LAFSGSAIH |
| 49 | 772 | 772 | CTCGCCTTCAGTGGCTCTGCTATACAC |
| 49 | 773 | 773 | RIRSKPNSYATEYAASVKG |
| 49 | 774 | 774 | CGTATTAGAAGCAAACCTAACAGTTACGCGACAGAATATGCTGCGTC |
| | | | GGTGAAGGGG |
| 49 | 775 | 775 | TLGYCSGDSCSSLRDY |
| 49 | 776 | 776 | ACTTTAGGATATTGTAGTGGTGATAGCTGCTCCTCTCTTAGGGACTAC |
| 49 | 777 | 777 | CAGTCTGCTCTGATTCAGCCTGCCTCCGTGTCTGGGTCTCCTGGACAG |
| | | | TCGATCACCATCTCCTGCACTGGAACCAGCAGTGACGTTGGTGGTTAT |
| | | | AACTATGTCTCTTGGTACCAACAGCACCCAGGCAAAGCCCCCAAACT |
| | | | CATGATTTATGATGTCAGTAATCGGCCCTCAGGGGTTTCTAATCGCTT |
| | | | CTCTGGCTCCAAGTCTGGCAACACGGCCTCCCTGACCATCTCTGGGCT |
| | | | CCAGGCTGAGGACGAGGCTGATTATTACTGCAGCTCATATACAAGTA |
| | | | GCAGCACTCTCGTGTTCGGCGGAGGGACCAAGGTCACCGTCCTA |
| 49 | 778 | 778 | QSALIQPASVSGSPGQSITISCTGTSSDVGGYNYVSWYQQHPGKAPKLMI |
| | | | YDVSNRPSGVSNRFSGSKSGNTASLTISGLQAEDEADYYCSSYTSSSTLVF |
| | | | GGGTKVTVL |
| 49 | 779 | 779 | TGTSSDVGGYNYVS |
| 49 | 780 | 780 | ACTGGAACCAGCAGTGACGTTGGTGGTTATAACTATGTCTCT |
| 49 | 781 | 781 | DVSNRPS |
| 49 | 782 | 782 | GATGTCAGTAATCGGCCCTCA |
| 49 | 783 | 783 | SSYTSSSTLV |
| 49 | 784 | 784 | AGCTCATATACAAGTAGCAGCACTCTCGTG |
| 50 | 785 | 785 | CAGGTCCAGCTGGTGCAGTCTGGAAGTGAGGTGAAGAAGCCTGGGGC |
| | | | CTCGGTGAAGGTCTCCTGCAAGGCCTCAGGTTACAGGTTTTCCAACTA |
| | | | TGGTATCAGCTGGGTGCGACAGGCCCCTGGACAAGGCCTAGAGTGGA |
| | | | TGGGATGGATCAGCGCTTACAATGGAAACATAAAGTATGGAAATAAC |
| | | | CTCCAGGGCAGAGTCACCGTGACCACAGACACATCCACGACCACGGC |
| | | | CTACATGGAGGTGAGGAGCCTGACATCTGACGACACGGCCGTGTATT |
| | | | ACTGTGCGAGAGATGTCCCAGCTGACGGGGTCCACTTCATGGACGTC |
| | | | TGGGGCAAAGGGACCACGGTCACCGTCTCCTCA |
| 50 | 786 | 786 | QVQLVQSGSEVKKPGASVKVSCKASGYRFSNYGISWVRQAPGQGLEWM |
| | | | GWISAYNGNIKYGNNLQGRVTVTTDTSTTTAYMEVRSLTSDDTAVYYC |
| | | | ARDVPADGVHFMDVWGKGTTVTVSS |
| 50 | 787 | 787 | YRFSNYGIS |
| 50 | 788 | 788 | TACAGGTTTTCCAACTATGGTATCAGC |
| 50 | 789 | 789 | WISAYNGNIKYGNNLQG |
| 50 | 790 | 790 | TGGATCAGCGCTTACAATGGAAACATAAAGTATGGAAATAACCTCCA |
| | | | GGGC |
| 50 | 791 | 791 | ARDVPADGVHFMDV |
| 50 | 792 | 792 | GCGAGAGATGTCCCAGCTGACGGGGTCCACTTCATGGACGTC |
| 50 | 793 | 793 | GATATTGTGATGACTCAGACTCCACTCTCCCTGCCCGTCACCCTTGGA |
| | | | CAGCCGGCCTCCATCTCCTGCAGGTCTAGTCAAAGCCTCGTACACAGT |
| | | | GATACTAACACCTACTTGAACTGGTTTCAGCAGAGGCCAGGCCAATC |
| | | | TCCACGGCGCCTAATTTATAAGGTTTCTAACCGGGACTCTGGGGTCCC |
| | | | AGACAGATTCAGCGGCAGTGGGTCAGGCACTACTTTCACACTGAAAA |
| | | | TCAGCAGGGTGGAGGCTGAGGATGTTGGGATTTATTACTGCATGCAG |
| | | | GGTTCACACTGGGCTCCGACTTTCGGCCAGGGGACCAAGGTGGAAAT |
| | | | CAAA |
| 50 | 794 | 794 | DIVMTQTPLSLPVTLGQPASISCRSSQSLVHSDTNTYLNWFQQRPGQSPR |
| | | | RLIYKVSNRDSGVPDRFSGSGSGTTFTLKISRVEAEDVGIYYCMQGSHWA |
| | | | PTFGQGTKVEIK |
| 50 | 795 | 795 | RSSQSLVHSDTNTYLN |
| 50 | 796 | 796 | AGGTCTAGTCAAAGCCTCGTACACAGTGATACTAACACCTACTTGAAC |
| 50 | 797 | 797 | KVSNRDS |
| 50 | 798 | 798 | AAGGTTTCTAACCGGGACTCT |
| 50 | 799 | 799 | MQGSHWAPT |
| 50 | 800 | 800 | ATGCAGGGTTCACACTGGGCTCCGACT |
| 51 | 801 | 801 | CAGGTCCAGCTGGTGCAGTCTGGGGGAGGCGTGGTCCAGCCTGGGAG |
| | | | GTCCCTGAGACTCTCCTGTGCAGCGTCTGGATTCACCTTCAGTAACTA |
| | | | TGGCATGCACTGGGTCCGCCAGGCTCCAGGCAAGGGGCTGGAGTGGG |
| | | | TGGCAGTTATATGGTATGATGGAAGTAATAAATACTATGCAGACTCC |
| | | | GTGAAGGGCCGATTCACCATCTCCAGAGACAATTCCAAGAACACGGT |
| | | | ATATCTGCAAATGAACAGCCTGAGAGCCGACGACACGGCTGTCTATT |
| | | | ACTGTGCGAGAGATGCGATATTTGGCAGTGGCCCCAACTGGTTCGAC |
| | | | CCCTGGGGTCAGGGAACCCTGGTCACCGTCTCCTCA |
| 51 | 802 | 802 | QVQLVQSGGGVVQPGRSLRLSCAASGFTFSNYGMHWVRQAPGKGLEW |
| | | | VAVIWYDGSNKYYADSVKGRFTISRDNSKNTVYLQMNSLRADDTAVYY |
| | | | CARDAIFGSGPNWFDPWGQGTLVTVSS |
| 51 | 803 | 803 | FTFSNYGMH |
| 51 | 804 | 804 | TTCACCTTCAGTAACTATGGCATGCAC |
| 51 | 805 | 805 | VIWYDGSNKYYADSVKG |
| 51 | 806 | 806 | GTTATATGGTATGATGGAAGTAATAAATACTATGCAGACTCCGTGAA |
| | | | GGGC |
| 51 | 807 | 807 | ARDAIFGSGPNWFDP |
| 51 | 808 | 808 | GCGAGAGATGCGATATTTGGCAGTGGCCCCAACTGGTTCGACCCC |
| 51 | 809 | 809 | CAGTCTGTCCTGACGCAGCCGCCCTCAGTGTCTGGGGCCCCAGGGCA |
| | | | GAGGGTCACCATCTCCTGCACTGGGAGCAGCTCCAACATCGGGGCAG |
| | | | GTTATGATGTACACTGGTACCAGCAGCTTCCAGGAACAGCCCCCAAA |
| | | | CTCCTCATCTATGGTAGCAGCAATCGGCCCTCAGGGGTCCCTGACCGG |
| | | | TTCTCTGGCTCCAAGTCTGGCACCTCAGCCTCCCTGGCCATCACTGGG |
| | | | CTCCAGGCTGAGGATGAGGCTGATTATTACTGCCAGTCCTATGAAAG |
| | | | CAGCCTGAGAGGTTGGGTGTTCGGCGGAGGGACCAAGGTCACCGTCC |
| | | | TA |
| 51 | 810 | 810 | QSVLTQPPSVSGAPGQRVTISCTGSSSNIGAGYDVHWYQQLPGTAPKLLI |
| | | | YGSSNRPSGVPDRFSGSKSGTSASLAITGLQAEDEADYYCQSYESSLRGW |
| | | | VFGGGTKVTVL |
| 51 | 811 | 811 | TGSSSNIGAGYDVH |
| 51 | 812 | 812 | ACTGGGAGCAGCTCCAACATCGGGGCAGGTTATGATGTACAC |
| 51 | 813 | 813 | GSSNRPS |
| 51 | 814 | 814 | GGTAGCAGCAATCGGCCCTCA |
| 51 | 815 | 815 | QSYESSLRGWV |
| 51 | 816 | 816 | CAGTCCTATGAAAGCAGCCTGAGAGGTTGGGTG |
| 52 | 817 | 817 | GAGGTGCAGCTGGTGGAGTCGGGGGGAGGCGTGGTCCAGCCTGGGA |
| | | | GGTCCCTGAGACTCTCCTGTGCAGCCTCTGGATTCACCTTCAGTGACC |
| | | | ATGCTATGTACTGGGTCCGCCAGGCTCCAGGCAAAGGGCTAGAGTGG |
| | | | GTGGCACTTATATCATTTGATGGAAGGAATATATACTACGCAGACTCC |
| | | | GTGAAGGGCCGATTCACCATCTCCAGAGACAATTCCAAGAACACGCT |
| | | | GTATCTGCAGATGAACAGCCTGAGAGCTGAGGACACGGCTGTCTATT |
| | | | ACTGTGCGAGAGATCAATGGCTGGTTCCTGACTACTGGGGCCAGGGA |
| | | | ACCCTGGTCACCGTCTCCTCA |
| 52 | 818 | 818 | EVQLVESGGGVVQPGRSLRLSCAASGFTFSDHAMYWVRQAPGKGLEW |
| | | | VALISFDGRNIYYADSVKGRFTISRDNSKNTLYLQMNSLRAEDTAVYYC |
| | | | ARDQWLVPDYWGQGTLVTVSS |
| 52 | 819 | 819 | FTFSDHAMY |
| 52 | 820 | 820 | TTCACCTTCAGTGACCATGCTATGTAC |
| 52 | 821 | 821 | LISFDGRNIYYADSVKG |
| 52 | 822 | 822 | CTTATATCATTTGATGGAAGGAATATATACTACGCAGACTCCGTGAA |
| | | | GGGC |
| 52 | 823 | 823 | ARDQWLVPDY |
| 52 | 824 | 824 | GCGAGAGATCAATGGCTGGTTCCTGACTAC |
| 52 | 825 | 825 | CAGTCTGTTCTGACTCAGCCTGCCTCCGTGTCTGGGTCTCCTGGACAG |
| | | | TCGATCACCATCTCCTGCACTGGAACCAGCAGTGACGTTGGTGGTTAT |
| | | | AACTATGTCTCCTGGTACCAACAGCACCCAGGCAACGCCCCCAAACT |
| | | | CATGATTTATGAAGTCAGTAAGCGGCCCTCAGGGGTCCCTGATCGCTT |
| | | | CTCTGGCTTCAAGTCTGGCAACACGGCCTCCCTGACCGTCTCTGGGCT |
| | | | CCAGGCTGAGGATGAGGCTGATTATTACTGCAGCTCATATGCAGGCA |
| | | | GCAACAGTGTCTTCGGAACTGGGACCAAGGTCACCGTCCTA |
| 52 | 826 | 826 | QSVLTQPASVSGSPGQSITISCTGTSSDVGGYNYVSWYQQHPGNAPKLMI |
| | | | YEVSKRPSGVPDRFSGFKSGNTASLTVSGLQAEDEADYYCSSYAGSNSV |
| | | | FGTGTKVTVL |
| 52 | 827 | 827 | TGTSSDVGGYNYVS |
| 52 | 828 | 828 | ACTGGAACCAGCAGTGACGTTGGTGGTTATAACTATGTCTCC |
| 52 | 829 | 829 | EVSKRPS |
| 52 | 830 | 830 | GAAGTCAGTAAGCGGCCCTCA |
| 52 | 831 | 831 | SSYAGSNSV |
| 52 | 832 | 832 | AGCTCATATGCAGGCAGCAACAGTGTC |
| 53 | 833 | 833 | GAGGTGCAGCTGGTGGAGTCTGGGGGAGGCTTGGTAAGGCCGGGGG |
| | | | GGTCCCTTGGACTCTCATGTTCAGCCTCTGGATTCATTTTCAGTAACG |
| | | | CTTGGATGACCTGGGTCCGCCAGGCTCCAGGGAAGGGACTGGAGTGG |
| | | | GTCGGCCATATTAAAAGCAAAGTTAATGGTGGGACAACAGCCTACGG |
| | | | TGCACCCGTGAAAGGCAGATTCACCATCTCAAGAGATGATTCACGAA |
| | | | ACACGCTGTTTCTGCAAATGAACAGCCTGAAAACCGAGGACACAGGC |
| | | | GTGTATTACTGTACTACAGGCCCACCCTATCAGTACTTTGATGATTCC |
| | | | GGTTATTCGGTCGTGGACTACTGGGGCCAGGGAACCCTGGTCACCGT |
| | | | CTCCTCC |
| 53 | 834 | 834 | EVQLVESGGGLVRPGGSLGLSCSASGFIFSNAWMTWVRQAPGKGLEWV |
| | | | GHIKSKVNGGTTAYGAPVKGRFTISRDDSRNTLFLQMNSLKTEDTGVYY |
| | | | CTTGPPYQYFDDSGYSVVDYWGQGTLVTVSS |
| 53 | 835 | 835 | FIFSNAWMT |
| 53 | 836 | 836 | TTCATTTTCAGTAACGCTTGGATGACC |
| 53 | 837 | 837 | HIKSKVNGGTTAYGAPVKG |
| 53 | 838 | 838 | CATATTAAAAGCAAAGTTAATGGTGGGACAACAGCCTACGGTGCACC |
| | | | CGTGAAAGGC |
| 53 | 839 | 839 | TTGPPYQYFDDSGYSVVDY |
| 53 | 840 | 840 | ACTACAGGCCCACCCTATCAGTACTTTGATGATTCCGGTTATTCGGTC |
| | | | GTGGACTAC |
| 53 | 841 | 841 | CAGTCTGTGGTGACGCAGCCGCCCTCAGCGTCTGGGACCCCCGGGCA |
| | | | GAGGGTCACCATCTCTTGTTCTGGAAGCGACTCCAACATCGGAACTG |
| | | | ATTATTTTTACTGGTACCAGCAGCTCCCAGGATCGGCCCCCAAACTCC |
| | | | TCATCTATGGTAGTAATCAGCGGCCCTCCGGGGTCCCTGACCGATTCT |
| | | | CTGGCTCCCAGTCTGGCTCCGCAGCCTCCCTGGCCATCAGTGGCCTCC |
| | | | GGTCCGAGGATGACGCTGACTATTACTGTGCAGCATGGGATGACAGC |
| | | | CTGGGTGGTCCGGTGTTCGGCGGTGGGACCAAGGTCACCGTCCTA |
| 53 | 842 | 842 | QSVVTQPPSASGTPGQRVTISCSGSDSNIGTDYFYWYQQLPGSAPKLLIY |
| | | | GSNQRPSGVPDRFSGSQSGSAASLAISGLRSEDDADYYCAAWDDSLGGP |
| | | | VFGGGTKVTVL |
| 53 | 843 | 843 | SGSDSNIGTDYFY |
| 53 | 844 | 844 | TCTGGAAGCGACTCCAACATCGGAACTGATTATTTTTAC |
| 53 | 845 | 845 | GSNQRPS |
| 53 | 846 | 846 | GGTAGTAATCAGCGGCCCTCC |
| 53 | 847 | 847 | AAWDDSLGGPV |
| 53 | 848 | 848 | GCAGCATGGGATGACAGCCTGGGTGGTCCGGTG |
| 54 | 849 | 849 | CAGGTGCAGCTACAGCAGTGGGGCACAGGACTGGTGAAGCCTTCGGA |
| | | | GACCCTGTCCCTAACCTGCGCAGTCTCTGGTGGGGCCTTCAGCGGTCA |
| | | | CCAGTGGAACTGGTTCCGCCAGCCCCCCGGGAAGGGTCTGGAGTGGA |
| | | | TTGGAGAAATCAATGTCAGTGGCAACACCCACTACAACGTGTCCCTC |
| | | | AGGAGTCGGGTCACCATTTCTCTGGACGAGTCCAAGAAACAATTCTC |
| | | | CCTGAAAATGACCTCTGTCACCGCCGCGGATACGGCTATTTACTACTG |
| | | | TGCGAAAGCCTCGAGTGGGTCTTATCACTTCGAGTATTGGTTCGACCC |
| | | | CTGGAGCCAGGGAACAATGGTCACCGTCTCCTCA |
| 54 | 850 | 850 | QVQLQQWGTGLVKPSETLSLTCAVSGGAFSGHQWNWFRQPPGKGLEWI |
| | | | GEINVSGNTHYNVSLRSRVTISLDESKKQFSLKMTSVTAADTAIYYCAKA |
| | | | SSGSYHFEYWFDPWSQGTMVTVSS |
| 54 | 851 | 851 | GAFSGHQWN |
| 54 | 852 | 852 | GGGGCCTTCAGCGGTCACCAGTGGAAC |
| 54 | 853 | 853 | EINVSGNTHYNVSLRS |
| 54 | 854 | 854 | GAAATCAATGTCAGTGGCAACACCCACTACAACGTGTCCCTCAGGAGT |
| 54 | 855 | 855 | AKASSGSYHFEYWFDP |
| 54 | 856 | 856 | GCGAAAGCCTCGAGTGGGTCTTATCACTTCGAGTATTGGTTCGACCCC |
| 54 | 857 | 857 | TCCTATGAGCTGACACAGCCACCCTCGGTGTCAGTGGCCCCAGGAAA |
| | | | GATGGCCTGGTTTACCTGTGGGGGAAGCGACATTGGAAGTAAAAGAG |
| | | | TCCACTGGTACCAGCAGAAGCCGGGCCAGGCCCCTGTCCTGCTCGTG |
| | | | TATGATGATTCCTTACGTCCCTCAGGGACCTCTGCCCGAGTCTCTGGC |
| | | | TCCACCTCTGGCAACACGGCCACCCTGAGTATCATCAGCGTCGAAGC |
| | | | CGGGGATGAGGCCGACTATTTTTGTCAGGTGTGGGATGATGCCGACG |
| | | | ATCATGCGGTGTTCGGCGGAGGGACCAAGCTCACCGTCCTA |
| 54 | 858 | 858 | SYELTQPPSVSVAPGKMAWFTCGGSDIGSKRVHWYQQKPGQAPVLLVY |
| | | | DDSLRPSGTSARVSGSTSGNTATLSIISVEAGDEADYFCQVWDDADDHA |
| | | | VFGGGTKLTVL |
| 54 | 859 | 859 | GGSDIGSKRVH |
| 54 | 860 | 860 | GGGGGAAGCGACATTGGAAGTAAAAGAGTCCAC |
| 54 | 861 | 861 | DDSLRPS |
| 54 | 862 | 862 | GATGATTCCTTACGTCCCTCA |
| 54 | 863 | 863 | QVWDDADDHAV |
| 54 | 864 | 864 | CAGGTGTGGGATGATGCCGACGATCATGCGGTG |
| 55 | 865 | 865 | GAGGTGCAGCTGGTGGAGTCGGGGGGAGGCGTGGTCCAGCCTGGGA |
| | | | GGTCCCTGAGACTCTCCTGTGCAGCCTCTGGATTCACCTTCAGTGACC |
| | | | ATGCTATGTACTGGGTCCGCCAGGCTCCAGGCAAAGGGCTAGAGTGG |
| | | | GTGGCACTTATATCATTTGATGGAAGGAATATATACTACGCAGACTCC |
| | | | GTGAAGGGCCGATTCACCATCTCCAGAGACAATTCCAAGAACACGCT |
| | | | GTATCTGCAGATGAACAGCCTGAGAGCTGAGGACACGGCTGTCTATT |
| | | | ACTGTGCGAGAGATCAATGGCTGGTTCCTGACTACTGGGGCCAGGGA |
| | | | ACCCTGGTCACCGTCTCCTCA |
| 55 | 866 | 866 | EVQLVESGGGVVQPGRSLRLSCAASGFTFSDHAMYWVRQAPGKGLEW |
| | | | VALISFDGRNIYYADSVKGRFTISRDNSKNTLYLQMNSLRAEDTAVYYC |
| | | | ARDQWLVPDYWGQGTLVTVSS |
| 55 | 867 | 867 | FTFSDHAMY |
| 55 | 868 | 868 | TTCACCTTCAGTGACCATGCTATGTAC |
| 55 | 869 | 869 | LISFDGRNIYYADSVKG |
| 55 | 870 | 870 | CTTATATCATTTGATGGAAGGAATATATACTACGCAGACTCCGTGAA |
| | | | GGGC |
| 55 | 871 | 871 | ARDQWLVPDY |
| 55 | 872 | 872 | GCGAGAGATCAATGGCTGGTTCCTGACTAC |
| 55 | 873 | 873 | CAGTCTGCTCTGACTCAGCCTGCCTCCGTGTCTGGGTCTCCTGGACAG |
| | | | TCGATCACCATCTCCTGCACTGGAACCAGCAGTGACGTTGGTGGTTAT |
| | | | AACTATGTCTCCTGGTACCAACAGCACCCAGGCAACGCCCCCAAACT |
| | | | CATGATTTATGAAGTCAGTAAGCGGCCCTCAGGGGTCCCTGATCGCTT |
| | | | CTCTGGCTTCAAGTCTGGCAACACGGCCTCCCTGACCGTCTCTGGGCT |
| | | | CCAGGCTGAGGATGAGGCTGATTATTACTGCAGCTCATATGCAGGCA |
| | | | GCAACAGTGTCTTCGGAACTGGGACCAAGGTGACCGTCCTA |
| 55 | 874 | 874 | QSALTQPASVSGSPGQSITISCTGTSSDVGGYNYVSWYQQHPGNAPKLMI |
| | | | YEVSKRPSGVPDRFSGFKSGNTASLTVSGLQAEDEADYYCSSYAGSNSV |
| | | | FGTGTKVTVL |
| 55 | 875 | 875 | TGTSSDVGGYNYVS |
| 55 | 876 | 876 | ACTGGAACCAGCAGTGACGTTGGTGGTTATAACTATGTCTCC |
| 55 | 877 | 877 | EVSKRPS |
| 55 | 878 | 878 | GAAGTCAGTAAGCGGCCCTCA |
| 55 | 879 | 879 | SSYAGSNSV |
| 55 | 880 | 880 | AGCTCATATGCAGGCAGCAACAGTGTC |
| 56 | 881 | 881 | CAGATCACCTTGAAGGAGTCTGGTCCTACGCTGGTGAAACCCACACA |
| | | | GACCCTCACGCTGACCTGCTCCTTCTCTGGGTTCTCACTCACCACTCG |
| | | | TGGAGTGGGTGTGGGCTGGGTCCGTCAGCCCCCAGGAAAGGCCCTGG |
| | | | AGTGCCTTGGATTCGTTTATTGGGACGATGATAAGCGCTACAGCCCAT |
| | | | CTCTGAGGAGCAGACTCACCATCTCCGAGGACACGTCCAAAAACCAG |
| | | | GTGGTCCTTACAATGACCAACATGGACCCTTTGGACACAGCCACGTA |
| | | | TTACTGTGTACACAGCGATCTCTATGATAGAGGTGGTTATTACTTATT |
| | | | CTACTTTGACTACTGGGGCCAGGGAACCCTGGTCACCGTCTCCTCA |
| 56 | 882 | 882 | QITLKESGPTLVKPTQTLTLTCSFSGFSLTTRGVGVGWVRQPPGKALECL |
| | | | GFVYWDDDKRYSPSLRSRLTISEDTSKNQVVLTMTNMDPLDTATYYCV |
| | | | HSDLYDRGGYYLFYFDYWGQGTLVTVSS |
| 56 | 883 | 883 | FSLTTRGVGVG |
| 56 | 884 | 884 | TTCTCACTCACCACTCGTGGAGTGGGTGTGGGC |
| 56 | 885 | 885 | FVYWDDDKRYSPSLRS |
| 56 | 886 | 886 | TTCGTTTATTGGGACGATGATAAGCGCTACAGCCCATCTCTGAGGAGC |
| 56 | 887 | 887 | VHSDLYDRGGYYLFYFDY |
| 56 | 888 | 888 | GTACACAGCGATCTCTATGATAGAGGTGGTTATTACTTATTCTACTTT |
| | | | GACTAC |
| 56 | 889 | 889 | GATATTGTGCTGACTCAGTCTCCATCCTCCCTGTCTGCATCTGTGGGG |
| | | | GACAGAGTCACCATCACTTGCCGGGCAAGTCAGCCCATTGCCAGCTA |
| | | | TTTAAATTGGTATCAGCACAAACCAGGGAAAGCCCCTAAACTCCTGA |
| | | | TCTATGCTGCATCCAGTTTGCAGAGTGGGGTCTCATCAACATTCAGTG |
| | | | GCCGGGGATCTGGGACAGATTTCACTCTCACCATCACCGCTCTGCAAC |
| | | | CTGAAGATTTTGCAATTTACTACTGTCAACAGAGTTACACTTTCCCGT |
| | | | ACACTTTTGGCCAGGGGACCAAAGTGGATATCAAA |
| 56 | 890 | 890 | DIVLTQSPSSLSASVGDRVTITCRASQPIASYLNWYQHKPGKAPKLLIYAA |
| | | | SSLQSGVSSTFSGRGSGTDFTLTITALQPEDFAIYYCQQSYTFPYTFGQGT |
| | | | KVDIK |
| 56 | 891 | 891 | RASQPIASYLN |
| 56 | 892 | 892 | CGGGCAAGTCAGCCCATTGCCAGCTATTTAAAT |
| 56 | 893 | 893 | AASSLQS |
| 56 | 894 | 894 | GCTGCATCCAGTTTGCAGAGT |
| 56 | 895 | 895 | QQSYTFPYT |
| 56 | 896 | 896 | CAACAGAGTTACACTTTCCCGTACACT |
| 57 | 897 | 897 | CAGGTGCAGCTGGTGCAGTCTGGAGCAGAGGTGAAGAAGCCGGGGG |
| | | | AGTCTCTGAAGATCTCCTGTCAAGGTTCTGGATATAGTTTTAGAAGTT |
| | | | ACTGGATCGGTTGGGTGCGCCAGAAGCCCGGGAAAGGCCTGGAATAT |
| | | | ATGGGCATCATCTTTCCTAATGACTTTGATACCAGATACAGCCCGTCC |
| | | | TTCCAAGGCCAGGTCACCATCTCCGTCGACAAGTCCACCAGCACCGC |
| | | | CTTCCTGCAGTGGACCAGCCTGCAGGCCTCGGACACCGCCATATATTA |
| | | | TTGTGGCAGACAAGAGCTGCAGGGTAGTTTTACTATATGGGGCCAAG |
| | | | GGACAATGGTCACCGTCACTTCA |
| 57 | 898 | 898 | QVQLVQSGAEVKKPGESLKISCQGSGYSFRSYWIGWVRQKPGKGLEYM |
| | | | GIIFPNDFDTRYSPSFQGQVTISVDKSTSTAFLQWTSLQASDTAIYYCGRQ |
| | | | ELQGSFTIWGQGTMVTVTS |
| 57 | 899 | 899 | YSFRSYWIG |
| 57 | 900 | 900 | TATAGTTTTAGAAGTTACTGGATCGGT |
| 57 | 901 | 901 | IIFPNDFDTRYSPSFQG |
| 57 | 902 | 902 | ATCATCTTTCCTAATGACTTTGATACCAGATACAGCCCGTCCTTCCAA |
| | | | GGC |
| 57 | 903 | 903 | GRQELQGSFTI |
| 57 | 904 | 904 | GGCAGACAAGAGCTGCAGGGTAGTTTTACTATA |
| 57 | 905 | 905 | GATATTGTGATGACTCAGTCTCCATCCTCCCTGTCCGCATCTGTCGGA |
| | | | GACAGAGTCACCATCACTTGCCAGGCGAGTCAGGACATGGGCAATTC |
| | | | TTTAAATTGGTATCAGCAAAAGTCAGGGAAAGCCCCTAAACTCCTGA |
| | | | TCTACGATGCATCGTATTTGGATTCAGGGGTCCCATCAAGGTTCAGTG |
| | | | GCAGTGGATCTGGGACACATTTTACTTTCACCATCAGCACCCTGCAGC |
| | | | CTGAAGATATTGCAACATATTACTGTCAACATTATGATAATCTCCTCT |
| | | | TATTCACTTTCGGCCCTGGGACCAAGCTGGAGATCAAA |
| 57 | 906 | 906 | DIVMTQSPSSLSASVGDRVTITCQASQDMGNSLNWYQQKSGKAPKLLIY |
| | | | DASYLDSGVPSRFSGSGSGTHFTFTISTLQPEDIATYYCQHYDNLLLFTFG |
| | | | PGTKLEIK |
| 57 | 907 | 907 | QASQDMGNSLN |
| 57 | 908 | 908 | CAGGCGAGTCAGGACATGGGCAATTCTTTAAAT |
| 57 | 909 | 909 | DASYLDS |
| 57 | 910 | 910 | GATGCATCGTATTTGGATTCA |
| 57 | 911 | 911 | QHYDNLLLFT |
| 57 | 912 | 912 | CAACATTATGATAATCTCCTCTTATTCACT |
| 58 | 913 | 913 | CAGATCACCTTGAAGGAGTCTGGTCCTACCCTGGTGAAACCCACACA |
| | | | GACCCTCACGCTGACCTGCACCTTCTCTGGGTTCTCACTCACCACTCG |
| | | | TGGAGTGGGTGTGGGCTGGATCCGTCAGCCCCCAGGAAAGGCCCTGG |
| | | | AGTTCCTAGGATTCATTCATTGGGATGATGATAAGACCTACAGCCCAT |
| | | | CTCTGAGGAGGAGACTCACCATCACCAAGGACACCTCCAACAACGAG |
| | | | GTGGTCCTTACAATGACCAACATGGACCCTGTGGACACAGCCACATA |
| | | | TTACTGTGTCCACAGCGATCTCTATGATAGTGGTGGTTATTACTTATA |
| | | | CTACTTTGACTACTGGGGCCAGGGAACCCTGGTCACCGTCTCCTCA |
| 58 | 914 | 914 | QITLKESGPTLVKPTQTLTLTCTFSGFSLTTRGVGVGWIRQPPGKALEFLG |
| | | | FIHWDDDKTYSPSLRRRLTITKDTSNNEVVLTMTNMDPVDTATYYCVHS |
| | | | DLYDSGGYYLYYFDYWGQGTLVTVSS |
| 58 | 915 | 915 | FSLTTRGVGVG |
| 58 | 916 | 916 | TTCTCACTCACCACTCGTGGAGTGGGTGTGGGC |
| 58 | 917 | 917 | FIHWDDDKTYSPSLRR |
| 58 | 918 | 918 | TTCATTCATTGGGATGATGATAAGACCTACAGCCCATCTCTGAGGAGG |
| 58 | 919 | 919 | VHSDLYDSGGYYLYYFDY |
| 58 | 920 | 920 | GTCCACAGCGATCTCTATGATAGTGGTGGTTATTACTTATACTACTTT |
| | | | GACTAC |
| 58 | 921 | 921 | GAAATTGTGATGACACAGTCTCCATCCTCCCTGTCTGCATCTGTGGGG |
| | | | GACAGAGTCACCATCACTTGCCGGGCAAGTCAGCCCATTCCCAGTTA |
| | | | TGTAAATTGGTATCAGCAGAGACCAGGGAAAGCCCCTAAGCTCCTGA |
| | | | TCTATGCTGCATCCAATTTGCAGAGTGGGGTCTCATCAAAATTTAGTG |
| | | | GCAGGGGATTTGGGACAGATTTCACTCTCACCATCGACACTCTGCAA |
| | | | CCTGAAGATTTTGCAACTTACTACTGTCAACAGGTTTACACTTCCCCG |
| | | | TACACTTTTGGCCAGGGGACCAAGCTGGAGATCAAA |
| 58 | 922 | 922 | EIVMTQSPSSLSASVGDRVTITCRASQPIPSYVNWYQQRPGKAPKLLIYA |
| | | | ASNLQSGVSSKFSGRGFGTDFTLTIDTLQPEDFATYYCQQVYTSPYTFGQ |
| | | | GTKLEIK |
| 58 | 923 | 923 | RASQPIPSYVN |
| 58 | 924 | 924 | CGGGCAAGTCAGCCCATTCCCAGTTATGTAAAT |
| 58 | 925 | 925 | AASNLQS |
| 58 | 926 | 926 | GCTGCATCCAATTTGCAGAGT |
| 58 | 927 | 927 | QQVYTSPYT |
| 58 | 928 | 928 | CAACAGGTTTACACTTCCCCGTACACT |
| 59 | 929 | 929 | GAGGTGCAGCTGGTGGAGTCTGGTCCTACGCTGGTGAAGCCCACACA |
| | | | GACCCTCACGCTGACCTGCACCTTCTCTGGGTTCTCACTCACCACTCG |
| | | | TGGAATGGGTGTGGGCTGGATCCGTCAGCCCCCAGGCAGGTCCCTGG |
| | | | AATGGCTTGCAGTCATTTATTGGGATGGTGATGTGCGCTACAGTCCAT |
| | | | CTCTGAAGGGCAGGCTCACCATCACCAAAGACACCCCCAAAAACCAG |
| | | | GTGGTCCTTACAATGACCAACATGGACCCTGTGGACACAGCCACATA |
| | | | TTACTGTGTACACAGCGATCTCTATGATAGGAATGCTTATTACCTGCA |
| | | | CTACTTTGACTTCTGGGGCCAAGGAACCCTGGTCACCGTCTCCTCA |
| 59 | 930 | 930 | EVQLVESGPTLVKPTQTLTLTCTFSGFSLTTRGMGVGWIRQPPGRSLEWL |
| | | | AVIYWDGDVRYSPSLKGRLTITKDTPKNQVVLTMTNMDPVDTATYYCV |
| | | | HSDLYDRNAYYLHYFDFWGQGTLVTVSS |
| 59 | 931 | 931 | FSLTTRGMGVG |
| 59 | 932 | 932 | TTCTCACTCACCACTCGTGGAATGGGTGTGGGC |
| 59 | 933 | 933 | VIYWDGDVRYSPSLKG |
| 59 | 934 | 934 | GTCATTTATTGGGATGGTGATGTGCGCTACAGTCCATCTCTGAAGGGC |
| 59 | 935 | 935 | VHSDLYDRNAYYLHYFDF |
| 59 | 936 | 936 | GTACACAGCGATCTCTATGATAGGAATGCTTATTACCTGCACTACTTT |
| | | | GACTTC |
| 59 | 937 | 937 | GACATCCGGTTGACCCAGTCTCCATCCTCCCTGTCTGCATCTGTAGGA |
| | | | GACAGAGTCACCATCACTTGCCGGGCAAGTCAGATTATTGCCAGTTA |
| | | | TTTAAATTGGTATCAGCAGAAACCAGGGAAAGCCCCTAACCTCCTGA |
| | | | TCTTTGCTGCATCCAGTTTGCAAAGTGGGGTCCCATCAAGGTTCCGTG |
| | | | GCAGTGGATCTGGGACAGATTTCACTCTCACCATAAGCAGTCTGCAA |
| | | | CCTGAAGACTTTGCAACTTACTACTGTCAACAGAGTTACAGTATACCG |
| | | | TACACTTTTGGCCAGGGGACCAAGCTGGAGATCAAA |
| 59 | 938 | 938 | DIRLTQSPSSLSASVGDRVTITCRASQIIASYLNWYQQKPGKAPNLLIFAA |
| | | | SSLQSGVPSRFRGSGSGTDFTLTISSLQPEDFATYYCQQSYSIPYTFGQGT |
| | | | KLEIK |
| 59 | 939 | 939 | RASQIIASYLN |
| 59 | 940 | 940 | CGGGCAAGTCAGATTATTGCCAGTTATTTAAAT |
| 59 | 941 | 941 | AASSLQS |
| 59 | 942 | 942 | GCTGCATCCAGTTTGCAAAGT |
| 59 | 943 | 943 | QQSYSIPYT |
| 59 | 944 | 944 | CAACAGAGTTACAGTATACCGTACACT |
| 60 | 945 | 945 | CAGGTCCAGCTGGTGCAGTCTGGTCCTGCACTGGTGAAACCCACACA |
| | | | GACCCTCACGCTGACCTGCACCTTCTCTGGATTCTCACTCACCACTCG |
| | | | TGGAGTGGGTGTGGGCTGGATCCGTCAGACCCCAGGAAAGGCCCTGG |
| | | | AGTGCCTTGGATTCATTTATTGGGATGATGATATGAACTACAACCCAT |
| | | | CTCTGAGGGGCAGAGTCACCATCACCAGGGACACCTCCAAAAACCAG |
| | | | GTGGTCCTAACAATGACCAACATGGCCCCTGTGGACACAGGCACATA |
| | | | TTACTGTGTACACAGCGATCTCTATGATAGTAGCGGTTATTATTTATA |
| | | | TTACTTTGACTACTGGGGCCAGGGAACCCTGGTCACCGTCTCCTCA |
| 60 | 946 | 946 | QVQLVQSGPALVKPTQTLTLTCTFSGFSLTTRGVGVGWIRQTPGKALECL |
| | | | GFIYWDDDMNYNPSLRGRVTITRDTSKNQVVLTMTNMAPVDTGTYYCV |
| | | | HSDLYDSSGYYLYYFDYWGQGTLVTVSS |
| 60 | 947 | 947 | FSLTTRGVGVG |
| 60 | 948 | 948 | TTCTCACTCACCACTCGTGGAGTGGGTGTGGGC |
| 60 | 949 | 949 | FIYWDDDMNYNPSLRG |
| 60 | 950 | 950 | TTCATTTATTGGGATGATGATATGAACTACAACCCATCTCTGAGGGGC |
| 60 | 951 | 951 | VHSDLYDSSGYYLYYFDY |
| 60 | 952 | 952 | GTACACAGCGATCTCTATGATAGTAGCGGTTATTATTTATATTACTTT |
| | | | GACTAC |
| 60 | 953 | 953 | GACATCCGGTTGACCCAGTCTCCATCCTCCCTGTCTGCATCTGTGGGG |
| | | | GACAGAGTCACCATCACTTGCCGGGCAAGTCAGCCCATTGCCAGTTA |
| | | | TTTAAATTGGTATCAGCAGAAACCAGGGAAAGCCCCTAAACTCCTGA |
| | | | TCTATGCTGCATCCAATTTGCAGAGTGGGGTCCCTTCAACATTCAGTG |
| | | | GCAGGGGATCTGGGACAGATTTCTCTCTCACCATCTCCACTCTGCAAC |
| | | | CTGAAGACATTGCAACTTACTACTGTCAACAGAGTTACACCTCCCCCT |
| | | | ACACTTTTGGCCAGGGGACCAAGGTGGAGATCAAA |
| 60 | 954 | 954 | DIRLTQSPSSLSASVGDRVTITCRASQPIASYLNWYQQKPGKAPKLLIYAA |
| | | | SNLQSGVPSTFSGRGSGTDFSLTISTLQPEDIATYYCQQSYTSPYTFGQGT |
| | | | KVEIK |
| 60 | 955 | 955 | RASQPIASYLN |
| 60 | 956 | 956 | CGGGCAAGTCAGCCCATTGCCAGTTATTTAAAT |
| 60 | 957 | 957 | AASNLQS |
| 60 | 958 | 958 | GCTGCATCCAATTTGCAGAGT |
| 60 | 959 | 959 | QQSYTSPYT |
| 60 | 960 | 960 | CAACAGAGTTACACCTCCCCCTACACT |
| 61 | 961 | 961 | GAGGTGCAGCTGTTGGAGTCTGGGGGAGGCCTGGTTAAGCCGGGGGG |
| | | | GTCCCTTAGACTCTCATGTGCAGCCTCTGGATTCATTTTCAATAACGC |
| | | | CTGGATGACCTGGGTCCGCCAGGCTCCAGGGAGGGGGCTGGAGTGGG |
| | | | TTGGCCGTATAAAAACCAATGCTGATGGTGGGACTGCAGACTACAGT |
| | | | ACACCCGTGAAAGGCAGATTCGCCATCTCAAGAGATGATTCTACAAA |
| | | | CACGCTGTATCTGCAAATGAACAGCCTGAAAACCGAGGACACAGCCG |
| | | | TCTATTACTGTACCACAGGCCCACCCTATAAGTACTCTGACAGTACTG |
| | | | GTTATTCGGTCGTTGACTACTGGGGCCAGGGCACCCTGGTCACTGTCT |
| | | | CTTCA |
| 61 | 962 | 962 | EVQLLESGGGLVKPGGSLRLSCAASGFIFNNAWMTWVRQAPGRGLEWV |
| | | | GRIKTNADGGTADYSTPVKGRFAISRDDSTNTLYLQMNSLKTEDTAVYY |
| | | | CTTGPPYKYSDSTGYSVVDYWGQGTLVTVSS |
| 61 | 963 | 963 | FIFNNAWMT |
| 61 | 964 | 964 | TTCATTTTCAATAACGCCTGGATGACC |
| 61 | 965 | 965 | RIKTNADGGTADYSTPVKG |
| 61 | 966 | 966 | CGTATAAAAACCAATGCTGATGGTGGGACTGCAGACTACAGTACACC |
| | | | CGTGAAAGGC |
| 61 | 967 | 967 | TTGPPYKYSDSTGYSVVDY |
| 61 | 968 | 968 | ACCACAGGCCCACCCTATAAGTACTCTGACAGTACTGGTTATTCGGTC |
| | | | GTTGACTAC |
| 61 | 969 | 969 | TCCTATGAGCTGACGCAGCCACCCTCAGCGTCTGGGACCCCCGGGCA |
| | | | GAGGGTCACCATCTCTTGTTCTGGAAGCAGCTCCAACATCGGAAGTA |
| | | | ATTATGTATATTGGTACCAGCAGCTCCCAGGAACGGCCCCCAAACTC |
| | | | CTCATCTATAGTACTAATCAGCGGCCCTCAGGGGTCCCTGACCGATTC |
| | | | TCTGGCTCCCAGTCTGGCACCTCAGCCTCCCTGGCCATCAGTGGGCTC |
| | | | CGGTCCGAGGATGAGGCTGATTATTACTGTGCAGCGTGGGATGACCG |
| | | | CCTGAGTGGTCCGGTGTTCGGCGGGGGCACCCAGCTGACCGTCCTC |
| 61 | 970 | 970 | SYELTQPPSASGTPGQRVTISCSGSSSNIGSNYVYWYQQLPGTAPKLLIYS |
| | | | TNQRPSGVPDRFSGSQSGTSASLAISGLRSEDEADYYCAAWDDRLSGPVF |
| | | | GGGTQLTVL |
| 61 | 971 | 971 | SGSSSNIGSNYVY |
| 61 | 972 | 972 | TCTGGAAGCAGCTCCAACATCGGAAGTAATTATGTATAT |
| 61 | 973 | 973 | STNQRPS |
| 61 | 974 | 974 | AGTACTAATCAGCGGCCCTCA |
| 61 | 975 | 975 | AAWDDRLSGPV |
| 61 | 976 | 976 | GCAGCGTGGGATGACCGCCTGAGTGGTCCGGTG |
| 62 | 977 | 977 | CAGGTCCAGCTTGTGCAGTCTGGGGCTGAGGTGAAGAAGCCGGGGTC |
| | | | CTCGGTGAAAATCTCCTGTAAGGCTTCTGGAGGCACCTTCAAAAGTC |
| | | | AAGCTATTCACTGGGTGCGACAGGCCCCTGGACAAGGGCTTGAGTGG |
| | | | ATGGGAAACATCATCCCTACCTACGGATCACCAAACTTCGCGCAGAG |
| | | | GTTCCTCGGCAGGGTCACCTTCATTGCGGACGATTCCACTGGCGCTGC |
| | | | CTCCATGGACCTGTATAGGCTGACATCTGAGGACACGGCCGTCTATTA |
| | | | CTGTGCGACAGCCGGGTGGTTCGGAGAATTAGTGCGGTTTGACTCCT |
| | | | GGGGCCAGGGAACCCTGGTCACCGTCTCCTCA |
| 62 | 978 | 978 | QVQLVQSGAEVKKPGSSVKISCKASGGTFKSQAIHWVRQAPGQGLEWM |
| | | | GNIIPTYGSPNFAQRFLGRVTFIADDSTGAASMDLYRLTSEDTAVYYCAT |
| | | | AGWFGELVRFDSWGQGTLVTVSS |
| 62 | 979 | 979 | GTFKSQAIH |
| 62 | 980 | 980 | GGCACCTTCAAAAGTCAAGCTATTCAC |
| 62 | 981 | 981 | NIIPTYGSPNFAQRFLG |
| 62 | 982 | 982 | AACATCATCCCTACCTACGGATCACCAAACTTCGCGCAGAGGTTCCTC |
| | | | GGC |
| 62 | 983 | 983 | ATAGWFGELVRFDS |
| 62 | 984 | 984 | GCGACAGCCGGGTGGTTCGGAGAATTAGTGCGGTTTGACTCC |
| 62 | 985 | 985 | GATATTGTGATGACTCAGTCTCCAGCCACCCTGTCTGTGTCTCCAGGG |
| | | | GAAAGAGCCACCCTCTCCTGCAGGGCCACTGAGAGTATTAGCAGCAA |
| | | | CTTAGCCTGGTACCAGCAGAAACCTGGCCAGGCTCCCAGGCTCCTCA |
| | | | TCTATGGTGCATCCACCAGGGCCACTGGTATCCCAGCCAGGTTCAGTG |
| | | | GCAGTGGGTCAGGGACAGAGTTCACTCTCACCATCAACAGCCTGCAG |
| | | | TCTGAAGATTTTGCAGTTTATTACTGTCAGCAGTATAATAACTGGCCT |
| | | | CCTCTCACTTTCGGCGGAGGGACCAAAGTGGATATCAAA |
| 62 | 986 | 986 | DIVMTQSPATLSVSPGERATLSCRATESISSNLAWYQQKPGQAPRLLIYG |
| | | | ASTRATGIPARFSGSGSGTEFTLTINSLQSEDFAVYYCQQYNNWPPLTFG |
| | | | GGTKVDIK |
| 62 | 987 | 987 | RATESISSNLA |
| 62 | 988 | 988 | AGGGCCACTGAGAGTATTAGCAGCAACTTAGCC |
| 62 | 989 | 989 | GASTRAT |
| 62 | 990 | 990 | GGTGCATCCACCAGGGCCACT |
| 62 | 991 | 991 | QQYNNWPPLT |
| 62 | 992 | 992 | CAGCAGTATAATAACTGGCCTCCTCTCACT |
| 63 | 993 | 993 | CAGGTCCAGCTGGTGCAGTCTGGGGCTGAGGTGAAGAAGCCTGGGTC |
| | | | CTCGGTGAAGGTCTCCTGCAAGGCTTCAGGAGACACCTTCAGCATGT |
| | | | ATGCTATCAGCTGGGTGCGACAGGCCCCTGGACAAGGACTTGAGTGG |
| | | | ATGGGAGGGGTCCTCCCAATGTTAGGGACCTCAAACTACGCACAACA |
| | | | GTTCCGGGGCAGAGTCACGATAACGGCGGACGGATCCACGAGCACA |
| | | | GCCTACATGGAGATGAGCAACCTGAGATTTGAGGACACGGCCGTTTA |
| | | | TTACTGTGCGAGGGTGGCCGGTCTGGGGAACAGCTATGGTCGCTACT |
| | | | TTGACGTCTGGGGTCAGGGAACCCTGGTCACCGTCTCCTCA |
| 63 | 994 | 994 | QVQLVQSGAEVKKPGSSVKVSCKASGDTFSMYAISWVRQAPGQGLEW |
| | | | MGGVLPMLGTSNYAQQFRGRVTITADGSTSTAYMEMSNLRFEDTAVYY |
| | | | CARVAGLGNSYGRYFDVWGQGTLVTVSS |
| 63 | 995 | 995 | DTFSMYAIS |
| 63 | 996 | 996 | GACACCTTCAGCATGTATGCTATCAGC |
| 63 | 997 | 997 | GVLPMLGTSNYAQQFRG |
| 63 | 998 | 998 | GGGGTCCTCCCAATGTTAGGGACCTCAAACTACGCACAACAGTTCCG |
| | | | GGGC |
| 63 | 999 | 999 | ARVAGLGNSYGRYFDV |
| 63 | 1000 | 1000 | GCGAGGGTGGCCGGTCTGGGGAACAGCTATGGTCGCTACTTTGACGTC |
| 63 | 1001 | 1001 | GACATCCGGATGACCCAGTCTCCATCTTCTGTGTCTGCATCTATTGGG |
| | | | GACAGAGTCACCATCACTTGTCGGGCGAGTCAGGATATCAGCACCTC |
| | | | GTTAGCCTGGTATCAGCAAAGACCAGGGAAAGCCCCTAATCTCCTGA |
| | | | TCTATGCTGCGTCCACTTTACACAGTGGGGTCCCATCGAGGTTCAGGG |
| | | | GCAGTGAATCTGGCCCAGACTTCACTCTCACTATCAGCAGCCTGCAGC |
| | | | CTGAAGATGTCGGAACTTACTATTGTCAACAGGCAAAGAGTTTCCCG |
| | | | TACACTTTTGGCCAGGGGACCAAGCTGGAGATCAAA |
| 63 | 1002 | 1002 | DIRMTQSPSSVSASIGDRVTITCRASQDISTSLAWYQQRPGKAPNLLIYAA |
| | | | STLHSGVPSRFRGSESGPDFTLTISSLQPEDVGTYYCQQAKSFPYTFGQGT |
| | | | KLEIK |
| 63 | 1003 | 1003 | RASQDISTSLA |
| 63 | 1004 | 1004 | CGGGCGAGTCAGGATATCAGCACCTCGTTAGCC |
| 63 | 1005 | 1005 | AASTLHS |
| 63 | 1006 | 1006 | GCTGCGTCCACTTTACACAGT |
| 63 | 1007 | 1007 | QQAKSFPYT |
| 63 | 1008 | 1008 | CAACAGGCAAAGAGTTTCCCGTACACT |
| 64 | 1009 | 1009 | CAGGTCCAGCTTGTGCAGTCTGGGGGAGGCCTGGTCAAGCCTGGGGG |
| | | | GTCCCTGAGACTCTCCTGTGCAGCTTCTGGATTCAGCCTCACAAACTA |
| | | | CAGAATGAACTGGGTCCGCCAGGCTCCAGGGAAGGGGCTGGAGTGG |
| | | | GTCTCATCCCTTAAGGATTCTAGTTCTTACATCTACTACGCAGACTCA |
| | | | GTGAAGGGCCGATTCACCGTCTCCAGAGACGACGCGAAGAATTCATT |
| | | | CTTTTTGCAAATGACCAATGTAAGAGCCGAGGACACGGCTGTTTATTA |
| | | | CTGTGCGAGAGAGGGATCGGACACGGAGTATTGGAGGCTGACGCCCC |
| | | | CCATGGACGTCTGGGGCAACGGGACCACGGTCACCGTCTCCTCA |
| 64 | 1010 | 1010 | QVQLVQSGGGLVKPGGSLRLSCAASGFSLTNYRMNWVRQAPGKGLEW |
| | | | VSSLKDSSSYIYYADSVKGRFTVSRDDAKNSFFLQMTNVRAEDTAVYYC |
| | | | AREGSDTEYWRLTPPMDVWGNGTTVTVSS |
| 64 | 1011 | 1011 | FSLTNYRMN |
| 64 | 1012 | 1012 | TTCAGCCTCACAAACTACAGAATGAAC |
| 64 | 1013 | 1013 | SLKDSSSYIYYADSVKG |
| 64 | 1014 | 1014 | TCCCTTAAGGATTCTAGTTCTTACATCTACTACGCAGACTCAGTGAAG |
| | | | GGC |
| 64 | 1015 | 1015 | AREGSDTEYWRLTPPMDV |
| 64 | 1016 | 1016 | GCGAGAGAGGGATCGGACACGGAGTATTGGAGGCTGACGCCCCCCAT |
| | | | GGACGTC |
| 64 | 1017 | 1017 | CAGTCTGTGTTGACGCAGCCGCCCTCGGTGTCAGTGGCCCCACGACA |
| | | | GACGGCCAGGATTACCTGTGGGGAGCACAACATTGGAACTAAAAGTG |
| | | | TGCACTGGTACCAGCAGAAGCCAGGCCAGGCCCCTGTCCTGGTCATC |
| | | | TATGATGACAGCGACCGGCCCTCAGGGATCCCTGCGCGATTCTCTGG |
| | | | CTCCAACTCTGGGAACACGGCCACCCTGACCATCAGCTGGGTCGAAG |
| | | | CCGGGGATGAGGCCGTCTATTACTGTCAGGTGTGGGACTCAGGTGAT |
| | | | CATCCTTGGCTGTTCGGCGGAGGCACCCAGCTGACCGTCCTC |
| 64 | 1018 | 1018 | QSVLTQPPSVSVAPRQTARITCGEHNIGTKSVHWYQQKPGQAPVLVIYD |
| | | | DSDRPSGIPARFSGSNSGNTATLTISWVEAGDEAVYYCQVWDSGDHPWL |
| | | | FGGGTQLTVL |
| 64 | 1019 | 1019 | GEHNIGTKSVH |
| 64 | 1020 | 1020 | GGGGAGCACAACATTGGAACTAAAAGTGTGCAC |
| 64 | 1021 | 1021 | DDSDRPS |
| 64 | 1022 | 1022 | GATGACAGCGACCGGCCCTCA |
| 64 | 1023 | 1023 | QVWDSGDHPWL |
| 64 | 1024 | 1024 | CAGGTGTGGGACTCAGGTGATCATCCTTGGCTG |
| 65 | 1025 | 1025 | GAGGTGCAGCTGGTGGAGTCAGGGGGAGGCTTGGTACAGCCGGGGG |
| | | | GGTCCCTGAGACTCTCCTGTGCAGCCTCTGGATTCCCCTTCAGTCGTT |
| | | | ATAACATGAACTGGGTCCGCCAGGCTCCAGGGAAGGGGCTGGAGTGG |
| | | | GTTTCATACATTAGTAGTGGTAGTCGAAGCATTTACTACGCAGACTCT |
| | | | GTGAAGGGCCGATTCACCATCTCCAGAGACAATGCCAAGAACTCACT |
| | | | GTATCTGCAAATGAACAGCCTGAGAGCCGAGGACACGGCTGTATATT |
| | | | ACTGTGCGAGAGACTTAAGCGGATCTCCAGCATATAGCGGCAGCTGG |
| | | | GTCTGGGGCCAGGGAACCCTGGTCACCGTCTCCTCA |
| 65 | 1026 | 1026 | EVQLVESGGGLVQPGGSLRLSCAASGFPFSRYNMNWVRQAPGKGLEWV |
| | | | SYISSGSRSIYYADSVKGRFTISRDNAKNSLYLQMNSLRAEDTAVYYCAR |
| | | | DLSGSPAYSGSWVWGQGTLVTVSS |
| 65 | 1027 | 1027 | FPFSRYNMN |
| 65 | 1028 | 1028 | TTCCCCTTCAGTCGTTATAACATGAAC |
| 65 | 1029 | 1029 | YISSGSRSIYYADSVKG |
| 65 | 1030 | 1030 | TACATTAGTAGTGGTAGTCGAAGCATTTACTACGCAGACTCTGTGAA |
| | | | GGGC |
| 65 | 1031 | 1031 | ARDLSGSPAYSGSWV |
| 65 | 1032 | 1032 | GCGAGAGACTTAAGCGGATCTCCAGCATATAGCGGCAGCTGGGTC |
| 65 | 1033 | 1033 | GAAACGACACTCACGCAGTCTCCAGCCACCCTGTCTGTGTCTCCAGG |
| | | | GGAAAGAGCCACCCTCTCCTGCAGGGCCAGTCAGAGTGTTAGCAGCA |
| | | | ACTTAGCCTGGTACCAGCAGAAACCTGGCCAGGCTCCCAGGCTCCTC |
| | | | ATCTATGATGCATCCACCAGGGCCACTGGTATCCCAGACAGGTTCAG |
| | | | TGGCAGTGGGTCTGGGACAGAGTTCACTCTCACCATCAGCAGCCTGC |
| | | | AGTCTGAAGACTTTGCACTTTATTACTGTCAGCAGTATGATAGGTGGC |
| | | | CTCCGTGGACGTTCGGCCAAGGGACCAAGGTGGAAATCAAA |
| 65 | 1034 | 1034 | ETTLTQSPATLSVSPGERATLSCRASQSVSSNLAWYQQKPGQAPRLLIYD |
| | | | ASTRATGIPDRFSGSGSGTEFTLTISSLQSEDFALYYCQQYDRWPPWTFG |
| | | | QGTKVEIK |
| 65 | 1035 | 1035 | RASQSVSSNLA |
| 65 | 1036 | 1036 | AGGGCCAGTCAGAGTGTTAGCAGCAACTTAGCC |
| 65 | 1037 | 1037 | DASTRAT |
| 65 | 1038 | 1038 | GATGCATCCACCAGGGCCACT |
| 65 | 1039 | 1039 | QQYDRWPPWT |
| 65 | 1040 | 1040 | CAGCAGTATGATAGGTGGCCTCCGTGGACG |
| 66 | 1041 | 1041 | CAGGTCCAGCTGGTGCAGTCTGGGGCTGAGGTGAAGAAGCCTGGGGC |
| | | | CTCAGTGAAGGTCTCCTGCAAGGCTTCTGGAAACTCCTTCAACGACTT |
| | | | TTATATGCACTGGGTGCGACAGGCCCCTGGACAAGGGCTTGAGTGGA |
| | | | TGGGATGGATCGACCCTAACAACGGAGGCGCAAACTATGCACAGAA |
| | | | GTTTCATGGCAGGGTCACTATGACCAGGGACTCGTCCATCAACACAG |
| | | | CCTACATGGAGTTGAGCAGGCTGAGATCCGACGACACGGCCGTCTAT |
| | | | TACTGTGCGAGCGAGCCCCCCGGCGTTGGTTTTGGATTGATTCCCCAC |
| | | | TACTACTTTGACAACTGGGGCCAGGGAACCCTGGTCACCGTCTCCTCA |
| 66 | 1042 | 1042 | QVQLVQSGAEVKKPGASVKVSCKASGNSFNDFYMHWVRQAPGQGLEW |
| | | | MGWIDPNNGGANYAQKFHGRVTMTRDSSINTAYMELSRLRSDDTAVYY |
| | | | CASEPPGVGFGLIPHYYFDNWGQGTLVTVSS |
| 66 | 1043 | 1043 | NSFNDFYMH |
| 66 | 1044 | 1044 | AACTCCTTCAACGACTTTTATATGCAC |
| 66 | 1045 | 1045 | WIDPNNGGANYAQKFHG |
| 66 | 1046 | 1046 | TGGATCGACCCTAACAACGGAGGCGCAAACTATGCACAGAAGTTTCA |
| | | | TGGC |
| 66 | 1047 | 1047 | ASEPPGVGFGLIPHYYFDN |
| 66 | 1048 | 1048 | GCGAGCGAGCCCCCCGGCGTTGGTTTTGGATTGATTCCCCACTACTAC |
| | | | TTTGACAAC |
| 66 | 1049 | 1049 | GAAATTGTGATGACACAGTCTCCAGACTCCCTGGCTGTGTCTCTGGGC |
| | | | GAGAGGGCCACCATCAACTGCAAGTCCAGCCAGAATGTTTTAGACAC |
| | | | CTCCAACAATAAGAACTACTTAGCTTGGTACCAGCAGAAACCAGGAC |
| | | | AGCCTCCTAGACTGCTCATTTACTGGGCATCTGCCCGCGGATCCGGGG |
| | | | TCCCTGACCGATTCAGTGGCAGCGGGTCTGGGACACATTTCACTCTCA |
| | | | CCATCAGCAGCCTGCAGGCTGAAGATGTGGCAGTTTATTACTGTCAG |
| | | | CAATATTTTAGTATTCCTCCGACGTTCGGCCAAGGGACCAAGGTGGA |
| | | | GATCAAA |
| 66 | 1050 | 1050 | EIVMTQSPDSLAVSLGERATINCKSSQNVLDTSNNKNYLAWYQQKPGQP |
| | | | PRLLIYWASARGSGVPDRFSGSGSGTHFTLTISSLQAEDVAVYYCQQYFSI |
| | | | PPTFGQGTKVEIK |
| 66 | 1051 | 1051 | KSSQNVLDTSNNKNYLA |
| 66 | 1052 | 1052 | AAGTCCAGCCAGAATGTTTTAGACACCTCCAACAATAAGAACTACTT |
| | | | AGCT |
| 66 | 1053 | 1053 | WASARGS |
| 66 | 1054 | 1054 | TGGGCATCTGCCCGCGGATCC |
| 66 | 1055 | 1055 | QQYFSIPPT |
| 66 | 1056 | 1056 | CAGCAATATTTTAGTATTCCTCCGACG |
| 67 | 1057 | 1057 | CAGGTCCAGCTGGTGCAGTCTGGGGCTGAGGTGAAGAAGCCTGGGTC |
| | | | CTCGGTGAAGGTCTCCTGCAAGGTTGCCGGAGGCTCCTTCTCCAATTA |
| | | | TGCAATCGCCTGGCTGCGACAGGCCCCTGGACAAGGGCTTGAGTGGA |
| | | | TGGGAGGTATCATCCCTGCCTTTAACAGAGCAATGTATGCACGGAAG |
| | | | TTCCAAGACAGAGTCACAATTACCGCGTACGCATCAACGACCACTGC |
| | | | CTACCTGGACATTACCGGCCTCAGATCTGAGGACACGGCCCTTTATTA |
| | | | TTGTGCGAGGCCTGCTGGAGACTTTGGGGATTTAAAGTGGGTACGAT |
| | | | CGCCTTTTGACTACTGGGGCCAGGGAACCCTGATCACCGTCTCCTCA |
| 67 | 1058 | 1058 | QVQLVQSGAEVKKPGSSVKVSCKVAGGSFSNYAIAWLRQAPGQGLEW |
| | | | MGGIIPAFNRAMYARKFQDRVTITAYASTTTAYLDITGLRSEDTALYYCA |
| | | | RPAGDFGDLKWVRSPFDYWGQGTLITVSS |
| 67 | 1059 | 1059 | GSFSNYAIA |
| 67 | 1060 | 1060 | GGCTCCTTCTCCAATTATGCAATCGCC |
| 67 | 1061 | 1061 | GIIPAFNRAMYARKFQD |
| 67 | 1062 | 1062 | GGTATCATCCCTGCCTTTAACAGAGCAATGTATGCACGGAAGTTCCA |
| | | | AGAC |
| 67 | 1063 | 1063 | ARPAGDFGDLKWVRSPFDY |
| 67 | 1064 | 1064 | GCGAGGCCTGCTGGAGACTTTGGGGATTTAAAGTGGGTACGATCGCC |
| | | | TTTTGACTAC |
| 67 | 1065 | 1065 | GATATTGTGATGACGCAGACTCCAGGCACCCTGTCTGTGTCTCCAGGG |
| | | | GAAAGAGCCACCCTCTCCTGCAGGGCCAGTCAGGACGTTGGCATCAA |
| | | | CTTAGCCTGGTATCAGCAGAAGCCTGGCCAGGCTCCCAGGCTCCTCAT |
| | | | ATATGGTGCATCCACCAGGGCCACTGATGTCCCAGCCAAGTTCAGTG |
| | | | GCAGTGGGTCTGGGACAGACTTCACTCTCACCATCAGCAGCCTGCAG |
| | | | TCTGAAGATTTTGGAGTTTATTATTGTCAGGAGTATAATGACTGGCCT |
| | | | CCCCAGCTCTCTTTCGGCCCTGGGACCAAAGTGGATATCAAA |
| 67 | 1066 | 1066 | DIVMTQTPGTLSVSPGERATLSCRASQDVGINLAWYQQKPGQAPRLLIY |
| | | | GASTRATDVPAKFSGSGSGTDFTLTISSLQSEDFGVYYCQEYNDWPPQLS |
| | | | FGPGTKVDIK |
| 67 | 1067 | 1067 | RASQDVGINLA |
| 67 | 1068 | 1068 | AGGGCCAGTCAGGACGTTGGCATCAACTTAGCC |
| 67 | 1069 | 1069 | GASTRAT |
| 67 | 1070 | 1070 | GGTGCATCCACCAGGGCCACT |
| 67 | 1071 | 1071 | QEYNDWPPQLS |
| 67 | 1072 | 1072 | CAGGAGTATAATGACTGGCCTCCCCAGCTCTCT |
| 68 | 1073 | 1073 | CAGATCACCTTGAAGGAGTCTGGTCCTACGCTGGTGAAACCCACACA |
| | | | GACCCTCACACTGACCTGCACCCTCTCTGGGTTCTCACTCAGCACTCC |
| | | | TAGAATGGGTGTGGGCTGGATCCGTCAGCCCCCAGGAAAGGCCCTGG |
| | | | AGTGGCTTGCACTCATTGATTGGGATGATGATAGGCGCTACAGTCCAT |
| | | | CTCTGAAGACCAGGCTCACCATCACCAAGGACACTTCCAAAAATCAG |
| | | | GTGGTCCTTAGAATGACCGACATGGACCCTGTGGACACAGGCACATA |
| | | | TTACTGTGTACACAGCGATGTCTATACTACTGGTGGTTATTACTTGTA |
| | | | CTACTTTGACTACTGGGGCCAGGGAACCCTGGTCACCGTCTCCTCA |
| 68 | 1074 | 1074 | QITLKESGPTLVKPTQTLTLTCTLSGFSLSTPRMGVGWIRQPPGKALEWL |
| | | | ALIDWDDDRRYSPSLKTRLTITKDTSKNQVVLRMTDMDPVDTGTYYCV |
| | | | HSDVYTTGGYYLYYFDYWGQGTLVTVSS |
| 68 | 1075 | 1075 | FSLSTPRMGVG |
| 68 | 1076 | 1076 | TTCTCACTCAGCACTCCTAGAATGGGTGTGGGC |
| 68 | 1077 | 1077 | LIDWDDDRRYSPSLKT |
| 68 | 1078 | 1078 | CTCATTGATTGGGATGATGATAGGCGCTACAGTCCATCTCTGAAGACC |
| 68 | 1079 | 1079 | VHSDVYTTGGYYLYYFDY |
| 68 | 1080 | 1080 | GTACACAGCGATGTCTATACTACTGGTGGTTATTACTTGTACTACTTT |
| | | | GACTAC |
| 68 | 1081 | 1081 | GACATCCAGGTGACCCAGTCTCCATCCTCCCTGTCTGCATCTGTAGGA |
| | | | GACAGAGTCACCATCACTTGCCGGGCAAGTCAGACCATTCCCAGCTA |
| | | | TTTAAATTGGTATCAGCACAAACCAGGGAAAGCCCCTCAGCTCCTGA |
| | | | TCTATGCTGCATCCAATTTGCGAAGTGGGGTCCCACCGAGGTTCCGTG |
| | | | GCAGTGGATCTGGGACAGATTTCACTCTCACCGTCAGCAGTCTGCAA |
| | | | CCTGAAGATTTTGCAACTTACTTCTGTCAACAGAGTTACAGTAGCCCA |
| | | | TACACTTTTGGCCAGGGGACCAAGCTGGAGATCAAA |
| 68 | 1082 | 1082 | DIQVTQSPSSLSASVGDRVTITCRASQTIPSYLNWYQHKPGKAPQLLIYAA |
| | | | SNLRSGVPPRFRGSGSGTDFTLTVSSLQPEDFATYFCQQSYSSPYTFGQGT |
| | | | KLEIK |
| 68 | 1083 | 1083 | RASQTIPSYLN |
| 68 | 1084 | 1084 | CGGGCAAGTCAGACCATTCCCAGCTATTTAAAT |
| 68 | 1085 | 1085 | AASNLRS |
| 68 | 1086 | 1086 | GCTGCATCCAATTTGCGAAGT |
| 68 | 1087 | 1087 | QQSYSSPYT |
| 68 | 1088 | 1088 | CAACAGAGTTACAGTAGCCCATACACT |
| 69 | 1089 | 1089 | CAGGTCCAGCTGGTACAGTCTGGAACTGAGGTGAAGAAGCCTGGGGC |
| | | | CTCAGTGAAGGTCTCCTGCAAGGGCTCTGGTTACATGTTTGCAAATTT |
| | | | TGGTGTCAGCTGGGTGCGACAGGCCCCTGGACGAGGGCTTGAGTGGA |
| | | | TCGGATGGATCAGCGCTTACAATGGAAACACATACTATGGACGTGAG |
| | | | CAGGGCAGATTCACCATGACCACAGACACGAACACAGCCTACCTGGA |
| | | | GCTGACGAGTCTCAGATATGACGACACGGCCCTTTATTTCTGTGCGAG |
| | | | AGATTCGGGAGCGACGGCGGCTGGAATACTCTGGGACTATTGGGGCC |
| | | | AGGGAACCCTGGTCACCGTCTCCTCA |
| 69 | 1090 | 1090 | QVQLVQSGTEVKKPGASVKVSCKGSGYMFANFGVSWVRQAPGRGLEW |
| | | | IGWISAYNGNTYYGREQGRFTMTTDTNTAYLELTSLRYDDTALYFCARD |
| | | | SGATAAGILWDYWGQGTLVTVSS |
| 69 | 1091 | 1091 | YMFANFGVS |
| 69 | 1092 | 1092 | TACATGTTTGCAAATTTTGGTGTCAGC |
| 69 | 1093 | 1093 | WISAYNGNTYYGREQG |
| 69 | 1094 | 1094 | TGGATCAGCGCTTACAATGGAAACACATACTATGGACGTGAGCAGGGC |
| 69 | 1095 | 1095 | ARDSGATAAGILWDY |
| 69 | 1096 | 1096 | GCGAGAGATTCGGGAGCGACGGCGGCTGGAATACTCTGGGACTAT |
| 69 | 1097 | 1097 | GAAATTGTAATGACACAGTCTCCACTCTCCCTGCCCGTCACCCTTGGA |
| | | | CAGCCGGCCTCCATCTCCTGCAGGTCTAGTCAAAGCCTCGCATACACT |
| | | | GATGGAAGCACTTACTTGAATTGGTTTCACCAGAGGCCAGGCCAGTC |
| | | | TCCACGGCGCCTAATTTATAAGGTTTTTAACCGGGACTCTGGGGTCCC |
| | | | CGACAGATTCAGCGGCAGTGGGGCAGGCACTGATTTCACACTGACTA |
| | | | TCAGCAGGGTGGAGGCTGAGGATGTTGGGGTTTATTACTGCATGCAA |
| | | | GCTACACACTGGCCTCGGACGTTCGGCCAGGGGACCAAAGTGGATAT |
| | | | CAAA |
| 69 | 1098 | 1098 | EIVMTQSPLSLPVTLGQPASISCRSSQSLAYTDGSTYLNWFHQRPGQSPRR |
| | | | LIYKVFNRDSGVPDRFSGSGAGTDFTLTISRVEAEDVGVYYCMQATHWP |
| | | | RTFGQGTKVDIK |
| 69 | 1099 | 1099 | RSSQSLAYTDGSTYLN |
| 69 | 1100 | 1100 | AGGTCTAGTCAAAGCCTCGCATACACTGATGGAAGCACTTACTTGAAT |
| 69 | 1101 | 1101 | KVFNRDS |
| 69 | 1102 | 1102 | AAGGTTTTTAACCGGGACTCT |
| 69 | 1103 | 1103 | MQATHWPRT |
| 69 | 1104 | 1104 | ATGCAAGCTACACACTGGCCTCGGACG |
| 70 | 1105 | 1105 | CAGGTCCAGCTGGTACAGTCTGGAAGTGAGGTGAAGAAGCCTGGGGC |
| | | | CTCGGTGACGCTCTCCTGCAAGGCCTCAGGTTACAGGTTTTCCAACTA |
| | | | TGGTGTCAGCTGGGTGCGACAGGCCCCCGGACAAGGCCTAGAGTGGA |
| | | | TGGGATGGATCAGCGGTTACAATGGAAACATAAAGTATGGAAACAGT |
| | | | CTCCAGGGCAGAGTCACCCTGACCACAGACACGACCACGGCCTACAT |
| | | | GGAGGTGACGAGCCTAACATCTGACGACACGGCCGTGTATTACTGTG |
| | | | CGAGAGATGTCCCAGCTGACGGGGTCCACTTCATGGACGTCTGGGGC |
| | | | AAAGGGACCACGGTCACCGTCTCCTCA |
| 70 | 1106 | 1106 | QVQLVQSGSEVKKPGASVTLSCKASGYRFSNYGVSWVRQAPGQGLEW |
| | | | MGWISGYNGNIKYGNSLQGRVTLTTDTTTAYMEVTSLTSDDTAVYYCA |
| | | | RDVPADGVHFMDVWGKGTTVTVSS |
| 70 | 1107 | 1107 | YRFSNYGVS |
| 70 | 1108 | 1108 | TACAGGTTTTCCAACTATGGTGTCAGC |
| 70 | 1109 | 1109 | WISGYNGNIKYGNSLQG |
| 70 | 1110 | 1110 | TGGATCAGCGGTTACAATGGAAACATAAAGTATGGAAACAGTCTCCA |
| | | | GGGC |
| 70 | 1111 | 1111 | ARDVPADGVHFMDV |
| 70 | 1112 | 1112 | GCGAGAGATGTCCCAGCTGACGGGGTCCACTTCATGGACGTC |
| 70 | 1113 | 1113 | GAAATTGTATTGACGCAGTCTCCACTCTCCCTGCCCGTCACCCTTGGA |
| | | | CAGCCGGCCTCCATCTCCTGCAGGTCTAGTCAAAGCCTCGTCCACAGT |
| | | | GATACTAACACCTACTTGACCTGGTTTCAGCAGAGGCCAGGCCAATC |
| | | | TCCACGGCGCCTAATTTATAAGGTTTCTCACCGGGACTCTGGGGTCCC |
| | | | AGACAGATTCAGCGGCAGTGGGTCAGGCACAACTTTCACGCTGAAAA |
| | | | TCGCCAGGGTGGAGGCTGAGGATGTTGGGATTTATTACTGCATGGAG |
| | | | GGGTCACACTGGGCTCCGACTTTCGGCCAGGGGACCAAAGTGGATAT |
| | | | CAAA |
| 70 | 1114 | 1114 | EIVLTQSPLSLPVTLGQPASISCRSSQSLVHSDTNTYLTWFQQRPGQSPRR |
| | | | LIYKVSHRDSGVPDRFSGSGSGTTFTLKIARVEAEDVGIYYCMEGSHWAP |
| | | | TFGQGTKVDIK |
| 70 | 1115 | 1115 | RSSQSLVHSDTNTYLT |
| 70 | 1116 | 1116 | AGGTCTAGTCAAAGCCTCGTCCACAGTGATACTAACACCTACTTGACC |
| 70 | 1117 | 1117 | KVSHRDS |
| 70 | 1118 | 1118 | AAGGTTTCTCACCGGGACTCT |
| 70 | 1119 | 1119 | MEGSHWAPT |
| 70 | 1120 | 1120 | ATGGAGGGGTCACACTGGGCTCCGACT |
| 71 | 1121 | 1121 | CAGGTGCAGCTACAGCAGTGGGGGGCCGAGGTGAAGAAGCCTGGGT |
| | | | CATCGGTGAAGGTCTCCTGCAAGGCTTCTGGAGTCGCCTTGAGCAGC |
| | | | GTTGCAATCAGCTGGGTGCGACAGGCCCCTGGACAAGGGCTTGAGTG |
| | | | GATGGGAGGGATCCTCCCTGGGTTTGACAAGGTCAGATTTGCCCAGG |
| | | | AGTTTGAGAATAGAGCCACTCTAACCGCGGACACAGCTAGGGATATA |
| | | | GCCTACATGGAGTTGAGCGGACTGAGATCTGACGACACGGCCGTCTA |
| | | | CTACTGTGCGATAATCGACCCCCAAGATTGCACTAGTGCCAGCTGCTT |
| | | | TTGGGTCAACTGGCTCGACCCCTGGGGCCAGGGAACCCTGGTCACCG |
| | | | TCTCCTCA |
| 71 | 1122 | 1122 | QVQLQQWGAEVKKPGSSVKVSCKASGVALSSVAISWVRQAPGQGLEW |
| | | | MGGILPGFDKVRFAQEFENRATLTADTARDIAYMELSGLRSDDTAVYYC |
| | | | AIIDPQDCTSASCFWVNWLDPWGQGTLVTVSS |
| 71 | 1123 | 1123 | VALSSVAIS |
| 71 | 1124 | 1124 | GTCGCCTTGAGCAGCGTTGCAATCAGC |
| 71 | 1125 | 1125 | GILPGFDKVRFAQEFEN |
| 71 | 1126 | 1126 | GGGATCCTCCCTGGGTTTGACAAGGTCAGATTTGCCCAGGAGTTTGA |
| | | | GAAT |
| 71 | 1127 | 1127 | AIIDPQDCTSASCFWVNWLDP |
| 71 | 1128 | 1128 | GCGATAATCGACCCCCAAGATTGCACTAGTGCCAGCTGCTTTTGGGTC |
| | | | AACTGGCTCGACCCC |
| 71 | 1129 | 1129 | GAAACGACACTCACGCAGTCTCCAGGCACCCTGACCGTGTCTCCAGG |
| | | | GGAGAGAGCCACCCTCTCCTGCAGGGCCAGTCAGAGTATTATTAGAA |
| | | | ACAACCTAGCCTGGTACCAGCAGAAACCTGGCCAGGCTCCCAGGCTC |
| | | | CTCATCTATGCTGCATCCAATAGGGCCACTGACATCCCAGACAGGTTC |
| | | | AGTGGCAGTGGGTCTGGGACAGACTTCACTCTCACCATCAGCAGACT |
| | | | GGAAGCACAAGATTTTGCAGTGTATTTCTGTCAGCAGTATGGTACCTC |
| | | | TCCGATCACCTTCGGCCAAGGGACCAAGGTGGAAATCAAA |
| 71 | 1130 | 1130 | ETTLTQSPGTLTVSPGERATLSCRASQSIIRNNLAWYQQKPGQAPRLLIYA |
| | | | ASNRATDIPDRFSGSGSGTDFTLTISRLEAQDFAVYFCQQYGTSPITFGQG |
| | | | TKVEIK |
| 71 | 1131 | 1131 | RASQSIIRNNLA |
| 71 | 1132 | 1132 | AGGGCCAGTCAGAGTATTATTAGAAACAACCTAGCC |
| 71 | 1133 | 1133 | AASNRAT |
| 71 | 1134 | 1134 | GCTGCATCCAATAGGGCCACT |
| 71 | 1135 | 1135 | QQYGTSPIT |
| 71 | 1136 | 1136 | CAGCAGTATGGTACCTCTCCGATCACC |
| 72 | 1137 | 1137 | GAGGTGCAGCTGTTGGAGTCTGGGGCTGAGGTGAAGAAGCCTGGGTC |
| | | | CTCGGTGAAGGTCTCCTGCAAGGTTGCCGGAGGAACCTTCAGCGACT |
| | | | ACGCCATCAGCTGGGTGCGACAGGCCCCTGGTCAAGGGCTGGAGTAC |
| | | | TTGGGAGGGATCATTCCTGCCTTTAAAAGAGCAATGTATCCACGGAA |
| | | | GTTTCAAGACAGAGTCACCATTACCGCGGACGAGTCCACGAGCACTG |
| | | | CCTACATGGAGCTGAGAGGCCTGAGATCTGAAGACACGGCCCTGTAT |
| | | | TATTGTGCGAGACCTGCTGGAGACTTTGGCGATTTAAAGTGGCTACG |
| | | | ATCGCCTTTTGACTACTGGGGCCAGGGAACCCTGGTCACCGTCTCCTCA |
| 72 | 1138 | 1138 | EVQLLESGAEVKKPGSSVKVSCKVAGGTFSDYAISWVRQAPGQGLEYLG |
| | | | GIIPAFKRAMYPRKFQDRVTITADESTSTAYMELRGLRSEDTALYYCARP |
| | | | AGDFGDLKWLRSPFDYWGQGTLVTVSS |
| 72 | 1139 | 1139 | GTFSDYAIS |
| 72 | 1140 | 1140 | GGAACCTTCAGCGACTACGCCATCAGC |
| 72 | 1141 | 1141 | GIIPAFKRAMYPRKFQD |
| 72 | 1142 | 1142 | GGGATCATTCCTGCCTTTAAAAGAGCAATGTATCCACGGAAGTTTCA |
| | | | AGAC |
| 72 | 1143 | 1143 | ARPAGDFGDLKWLRSPFDY |
| 72 | 1144 | 1144 | GCGAGACCTGCTGGAGACTTTGGCGATTTAAAGTGGCTACGATCGCC |
| | | | TTTTGACTAC |
| 72 | 1145 | 1145 | GATATTGTGCTGACTCAGTCTCCAGCCACCCTGTCTGTGTCTCCAGGG |
| | | | GAAAGAGCCACGCTCTCCTGCAGGGCCAGTGAGGGTGTAGGCATCAA |
| | | | CTTAGCCTGGTACCAGCAGAAACCTGGCCAGGCTCCCAGGCTCCTCA |
| | | | TCTATGGTGCATCGACCAGGGCCACTGATATCCCAGCCAGGTTCAGT |
| | | | GGCAGTGGGTCTGGGACAGACTTCACTCTCACCATCAGCAGCCTGCA |
| | | | ATCTGAAGATTTTGCAGTTTATTATTGTCAGCAGTATAATGATTGGCC |
| | | | TCCCCAGCTCACTTTCGGCCCTGGGACCAAAGTGGATATCAAA |
| 72 | 1146 | 1146 | DIVLTQSPATLSVSPGERATLSCRASEGVGINLAWYQQKPGQAPRLLIYG |
| | | | ASTRATDIPARFSGSGSGTDFTLTISSLQSEDFAVYYCQQYNDWPPQLTF |
| | | | GPGTKVDIK |
| 72 | 1147 | 1147 | RASEGVGINLA |
| 72 | 1148 | 1148 | AGGGCCAGTGAGGGTGTAGGCATCAACTTAGCC |
| 72 | 1149 | 1149 | GASTRAT |
| 72 | 1150 | 1150 | GGTGCATCGACCAGGGCCACT |
| 72 | 1151 | 1151 | QQYNDWPPQLT |
| 72 | 1152 | 1152 | CAGCAGTATAATGATTGGCCTCCCCAGCTCACT |
| 73 | 1153 | 1153 | GAGGTGCAGCTGGTGGAGTCTGGGGCTGAGGTGAAGAAGCCTGGGTC |
| | | | CTCGGTGAAGGTCTCCTGTAAGGTTGTCGGAGGCAGTTTCAGCAACT |
| | | | ATGGTATCAGCTGGGTGCGACAGGCCCCTGGACAGGGGCCTGAGTGG |
| | | | ATGGGCGGGATCATCCCTGCCTTTAAGACAGCAAAATATGCAAAGAA |
| | | | GTTCGAGGACAGAGTCACAATTACCGCGGACGAATCCACGAGCACTG |
| | | | CCTACATGGAGGTGAGCGGCCTGAGATCTGACGACACGGCCCTGTAT |
| | | | TATTGTGCGAGGCCTGAACGAGACTTTGGGCATTTAAAGTGGCTACG |
| | | | CTCGCCTTTTGACTACTGGGGCCAGGGAACCCTGGTCACCGTCTCCTCA |
| 73 | 1154 | 1154 | EVQLVESGAEVKKPGSSVKVSCKVVGGSFSNYGISWVRQAPGQGPEWM |
| | | | GGIIPAFKTAKYAKKFEDRVTITADESTSTAYMEVSGLRSDDTALYYCAR |
| | | | PERDFGHLKWLRSPFDYWGQGTLVTVSS |
| 73 | 1155 | 1155 | GSFSNYGIS |
| 73 | 1156 | 1156 | GGCAGTTTCAGCAACTATGGTATCAGC |
| 73 | 1157 | 1157 | GIIPAFKTAKYAKKFED |
| 73 | 1158 | 1158 | GGGATCATCCCTGCCTTTAAGACAGCAAAATATGCAAAGAAGTTCGA |
| | | | GGAC |
| 73 | 1159 | 1159 | ARPERDFGHLKWLRSPFDY |
| 73 | 1160 | 1160 | GCGAGGCCTGAACGAGACTTTGGGCATTTAAAGTGGCTACGCTCGCC |
| | | | TTTTGACTAC |
| 73 | 1161 | 1161 | GAAACGACACTCACGCAGTCTCCAGCCACCCTGTCTGTGTCTCCAGG |
| | | | GGAAAGAGTCACCCTCTCCTGCAGGGCCAGTCAGGGTGTTAGCATCA |
| | | | ACTTAGCCTGGTACCAGCAGAAACCTGGCCAGGCTCCCAGGCTCCTC |
| | | | ATCTATGGTGCATCCACCAGGGCCACTGATATCCCAGCCAGGTTCAGT |
| | | | GGCAGTGGGTCTGGGACAGACTTCACTCTCACCATCAGCAGCCTGCA |
| | | | GTCTGAAGATTTTGCAGTTTATTATTGTCAGCAGTATAATGACTGGCC |
| | | | TCCCCAGCTCACTTTCGGCCCTGGGACCAAGGTGGAAATCAAA |
| 73 | 1162 | 1162 | ETTLTQSPATLSVSPGERVTLSCRASQGVSINLAWYQQKPGQAPRLLIYG |
| | | | ASTRATDIPARFSGSGSGTDFTLTISSLQSEDFAVYYCQQYNDWPPQLTF |
| | | | GPGTKVEIK |
| 73 | 1163 | 1163 | RASQGVSINLA |
| 73 | 1164 | 1164 | AGGGCCAGTCAGGGTGTTAGCATCAACTTAGCC |
| 73 | 1165 | 1165 | GASTRAT |
| 73 | 1166 | 1166 | GGTGCATCCACCAGGGCCACT |
| 73 | 1167 | 1167 | QQYNDWPPQLT |
| 73 | 1168 | 1168 | CAGCAGTATAATGACTGGCCTCCCCAGCTCACT |
| 74 | 1169 | 1169 | CAGGTCCAGCTGGTGCAGTCTGGGTCTGAGGTGAAGAGGCCTGGGTC |
| | | | ATCGGTGAAGGTCTCCTGCAAGGCCTCAGGAGTCGCTTTGACCACCG |
| | | | TTGCTGTCAACTGGGTGCGCCAGGTCCCTGGGCAAGGGCCTGAGTGG |
| | | | ATTGGAGGGATCCTCATTGGGTTTGGTAAGGTCAGACAGGCCCAGAA |
| | | | ATTTGAGAACCGAGTCACTTTTACCGCGGACGCATCTAGGAACACAG |
| | | | CCTACATGGAGTTGAGCGGACTGAGATCTGAGGACACGGCCGTCTAT |
| | | | TACTGTGCGATAATCGACCCCCAAGATTGTACTCGTGCCAGTTGCTTT |
| | | | TGGGTCAACTGGCTCGCCCCCTGGGGCCACGGAACCCTGGTCACCGT |
| | | | CTCCTCA |
| 74 | 1170 | 1170 | QVQLVQSGSEVKRPGSSVKVSCKASGVALTTVAVNWVRQVPGQGPEWI |
| | | | GGILIGFGKVRQAQKFENRVTFTADASRNTAYMELSGLRSEDTAVYYCA |
| | | | IIDPQDCTRASCFWVNWLAPWGHGTLVTVSS |
| 74 | 1171 | 1171 | VALTTVAVN |
| 74 | 1172 | 1172 | GTCGCTTTGACCACCGTTGCTGTCAAC |
| 74 | 1173 | 1173 | GILIGFGKVRQAQKFEN |
| 74 | 1174 | 1174 | GGGATCCTCATTGGGTTTGGTAAGGTCAGACAGGCCCAGAAATTTGA |
| | | | GAAC |
| 74 | 1175 | 1175 | AIIDPQDCTRASCFWVNWLAP |
| 74 | 1176 | 1176 | GCGATAATCGACCCCCAAGATTGTACTCGTGCCAGTTGCTTTTGGGTC |
| | | | AACTGGCTCGCCCCC |
| 74 | 1177 | 1177 | GACATCCGGGTGACCCAGTCTCCAGGCACCCTGACCTTGTCCCCAGG |
| | | | GGAGAGAGCCTCCCTCTCCTGCAGGGCCAGTGAGAGTATTCTTAACG |
| | | | GGAACTTAGCCTGGTACCAACAGAAACCTGGCCAGGCTCCCAGGCTC |
| | | | CTCATCTATGCTGCTTCCAGTAGGGCCACTGACATCCCAGACAGGTTC |
| | | | AGTGGCAGTGGGTCTGGGACAGACTTCACTCTCACCATCAGCAGACT |
| | | | GGAGCCTCAAGATTTTGCAGTCTATTATTGTCAGCAGTATGGTTCGGC |
| | | | TCCGATCACCTTCGGCCAAGGGACACGACTGGAGATTAAA |
| 74 | 1178 | 1178 | DIRVTQSPGTLTLSPGERASLSCRASESILNGNLAWYQQKPGQAPRLLIYA |
| | | | ASSRATDIPDRFSGSGSGTDFTLTISRLEPQDFAVYYCQQYGSAPITFGQG |
| | | | TRLEIK |
| 74 | 1179 | 1179 | RASESILNGNLA |
| 74 | 1180 | 1180 | AGGGCCAGTGAGAGTATTCTTAACGGGAACTTAGCC |
| 74 | 1181 | 1181 | AASSRAT |
| 74 | 1182 | 1182 | GCTGCTTCCAGTAGGGCCACT |
| 74 | 1183 | 1183 | QQYGSAPIT |
| 74 | 1184 | 1184 | CAGCAGTATGGTTCGGCTCCGATCACC |
| 75 | 1185 | 1185 | CAGGTCCAGCTTGTACAGTCTGGAAGTGAGGTGAAGAAGCCTGGGGC |
| | | | CTCGGTGACGGTCTCCTGCAAGGCCTCAGGTTACAGGTTTTCCAACTA |
| | | | TGGTGTCAGCTGGGTGCGACAGGCCCCTGGACAAGGCCTAGAGTGGA |
| | | | TGGGATGGATCAGCGCTTACAATGGAAACACAAAGTATGGAAATAGT |
| | | | CTCCAGGGCAGAGTCACCCTGACCACAGACACGACCACGGCCTACAT |
| | | | GGAGGTGAGGAGCCTGACATCTGACGACACGGCCGTGTATTACTGTG |
| | | | CGAGAGATGTCCCAGGTGACGGGGTCCACTTCATGGACGTCTGGGGC |
| | | | AAAGGGACCACGGTCACCGTCTCCTCA |
| 75 | 1186 | 1186 | QVQLVQSGSEVKKPGASVTVSCKASGYRFSNYGVSWVRQAPGQGLEW |
| | | | MGWISAYNGNTKYGNSLQGRVTLTTDTTTAYMEVRSLTSDDTAVYYCA |
| | | | RDVPGDGVHFMDVWGKGTTVTVSS |
| 75 | 1187 | 1187 | YRFSNYGVS |
| 75 | 1188 | 1188 | TACAGGTTTTCCAACTATGGTGTCAGC |
| 75 | 1189 | 1189 | WISAYNGNTKYGNSLQG |
| 75 | 1190 | 1190 | TGGATCAGCGCTTACAATGGAAACACAAAGTATGGAAATAGTCTCCA |
| | | | GGGC |
| 75 | 1191 | 1191 | ARDVPGDGVHFMDV |
| 75 | 1192 | 1192 | GCGAGAGATGTCCCAGGTGACGGGGTCCACTTCATGGACGTC |
| 75 | 1193 | 1193 | GAAATTGTGATGACGCAGTCTCCACTCTCCCTGCCCGTCACCCTTGGA |
| | | | CAGTCGGCCTCCATCTCCTGCAGGTCGAGTCAAAGCCTCGTACACAGT |
| | | | GATACTAACACCTACTTGACCTGGTTTCAGCAGAGGCCAGGCCAATC |
| | | | TCCACGGCGCCTCATTTATAAGGTTTCTCACCGGGACTCTGGGGTCCC |
| | | | AGACAGATTCAGCGGCAGTGGGTCAGGCACTACTTTTACACTGAAAA |
| | | | TCAGCAGGGTGGAGGCTGAGGATGTTGGAATTTATTACTGCATGGAG |
| | | | GGTTCACACTGGGCTCCGACTTTCGGCCAGGGGACCAAGGTGGAAAT |
| | | | CAAA |
| 75 | 1194 | 1194 | EIVMTQSPLSLPVTLGQSASISCRSSQSLVHSDTNTYLTWFQQRPGQSPRR |
| | | | LIYKVSHRDSGVPDRFSGSGSGTTFTLKISRVEAEDVGIYYCMEGSHWAP |
| | | | TFGQGTKVEIK |
| 75 | 1195 | 1195 | RSSQSLVHSDTNTYLT |
| 75 | 1196 | 1196 | AGGTCGAGTCAAAGCCTCGTACACAGTGATACTAACACCTACTTGACC |
| 75 | 1197 | 1197 | KVSHRDS |
| 75 | 1198 | 1198 | AAGGTTTCTCACCGGGACTCT |
| 75 | 1199 | 1199 | MEGSHWAPT |
| 75 | 1200 | 1200 | ATGGAGGGTTCACACTGGGCTCCGACT |
| 76 | 1201 | 1201 | CAGGTCCAGCTTGTGCAGTCTGGGGGAGGCGTTGTCCAGCCTGGGAG |
| | | | CTCCCTGAGACTCTCCTGTTCAGCGTCTGGATTTACCTTCATGACCTAT |
| | | | GGCATGCACTGGGCCCGCCAGGCTCCAGGCAAGGGGCTGGAGTGGGT |
| | | | CGCAGATATTTCCTTTGATGCAAATAAGAAATACTATAGAGATTCCGT |
| | | | GAAGGGCCGATTCACCATCTCCAGGGACAATTCCAAGAACACGGTGT |
| | | | ATCTGCAAATGAACAGCCTGAGACCCGAGGACACGGCTGTCTACTTC |
| | | | TGTGCGAGAAATACGATTTTTGGAGTAGTTGACTACTGGGGCCAGGG |
| | | | AACCCTGGTCACCGTCTCCTCA |
| 76 | 1202 | 1202 | QVQLVQSGGGVVQPGSSLRLSCSASGFTFMTYGMHWARQAPGKGLEW |
| | | | VADISFDANKKYYRDSVKGRFTISRDNSKNTVYLQMNSLRPEDTAVYFC |
| | | | ARNTIFGVVDYWGQGTLVTVSS |
| 76 | 1203 | 1203 | FTFMTYGMH |
| 76 | 1204 | 1204 | TTTACCTTCATGACCTATGGCATGCAC |
| 76 | 1205 | 1205 | DISFDANKKYYRDSVKG |
| 76 | 1206 | 1206 | GATATTTCCTTTGATGCAAATAAGAAATACTATAGAGATTCCGTGAAG |
| | | | GGC |
| 76 | 1207 | 1207 | ARNTIFGVVDY |
| 76 | 1208 | 1208 | GCGAGAAATACGATTTTTGGAGTAGTTGACTAC |
| 76 | 1209 | 1209 | GAAATTGTATTGACACAGTCTCCAGCCACCCTGTCTGTGTCTCCAGGG |
| | | | GAAAGAGCCACCCTCTCCTGCAGGGCCAGTCAGAGTGTTAGCGCCAA |
| | | | CTTAGCCTGGTACCAGCATAAACCTGGCCAGGCTCCCAGGCTCCTCAT |
| | | | CTATGGTGCGTCCACCAGGGCCAGTGATATCCCAGCCAGGTTCAGTG |
| | | | GCAGTGGGTCTGGGACAGAGTTCACTCTCACCATCAGCAGCCTGCAG |
| | | | TCTGAAGATTCTGCAGTTTATTACTGTCAGCAGTATAATAACTGGCCT |
| | | | CCGTGGACGTTCGGCCAAGGGACCAAGGTGGAAATCAAA |
| 76 | 1210 | 1210 | EIVLTQSPATLSVSPGERATLSCRASQSVSANLAWYQHKPGQAPRLLIYG |
| | | | ASTRASDIPARFSGSGSGTEFTLTISSLQSEDSAVYYCQQYNNWPPWTFG |
| | | | QGTKVEIK |
| 76 | 1211 | 1211 | RASQSVSANLA |
| 76 | 1212 | 1212 | AGGGCCAGTCAGAGTGTTAGCGCCAACTTAGCC |
| 76 | 1213 | 1213 | GASTRAS |
| 76 | 1214 | 1214 | GGTGCGTCCACCAGGGCCAGT |
| 76 | 1215 | 1215 | QQYNNWPPWT |
| 76 | 1216 | 1216 | CAGCAGTATAATAACTGGCCTCCGTGGACG |
| 77 | 1217 | 1217 | CAGGTCCAGCTGGTGCAGTCTGGAGTTGAGGTGAAGAAGCCTGGGGC |
| | | | CTCAGTGAAGGTCTCCTGCAAGACTTCTGGTTACACCTTTAGTAATTA |
| | | | TGGTGTCACCTGGGTGCGACAGGCCCCTGGACAAGGGCTTGAGTACA |
| | | | TGGGATGGATCAGCGCTTACAATGGTAACACAAACTATGCCCAGAAT |
| | | | GTCCAGGGTCGACTCACCATGACCACAGACACATCCACGAGCACAGG |
| | | | CTACATGGAGTTGAGGAGGCTGACATCTGACGACACGGCCGTGTATT |
| | | | TCTGTGCGAGAGATAAAGGTGTAACAGTGGCCGGTTCATTGCTTGAC |
| | | | TACTGGGGCCAGGGAACCCTGGTCACCGTCTCCTCA |
| 77 | 1218 | 1218 | QVQLVQSGVEVKKPGASVKVSCKTSGYTFSNYGVTWVRQAPGQGLEY |
| | | | MGWISAYNGNTNYAQNVQGRLTMTTDTSTSTGYMELRRLTSDDTAVYF |
| | | | CARDKGVTVAGSLLDYWGQGTLVTVSS |
| 77 | 1219 | 1219 | YTFSNYGVT |
| 77 | 1220 | 1220 | TACACCTTTAGTAATTATGGTGTCACC |
| 77 | 1221 | 1221 | WISAYNGNTNYAQNVQG |
| 77 | 1222 | 1222 | TGGATCAGCGCTTACAATGGTAACACAAACTATGCCCAGAATGTCCA |
| | | | GGGT |
| 77 | 1223 | 1223 | ARDKGVTVAGSLLDY |
| 77 | 1224 | 1224 | GCGAGAGATAAAGGTGTAACAGTGGCCGGTTCATTGCTTGACTAC |
| 77 | 1225 | 1225 | GAAATTGTGATGACACAGTCTCCACTCTCCCTGCCCGTCACCCTTGGA |
| | | | CAGCCGGCCTCCATCTCCTGCAGGTCTAGTCAAAGTCTCGAACATAGT |
| | | | GATGGAAACACCTACTTGAATTGGTTTCAGCAGAGGCCAGGCCAATC |
| | | | TCCAAGGCGCCTCATTTATAAGGTTTCTAACCGGGACTCTGGGGTCCC |
| | | | AGACAGATTCAGCGGCAGTGGGTCAGGCACTGATTTCACACTGAAAA |
| | | | TCAACAGGGTGGAGGCTGAGGATGTTGGGGTTTATTACTGCATGGAA |
| | | | AGTACACACTGGCCTCCGTACACTTTTGGCCAGGGGACCAAGGTGGA |
| | | | GATCAAA |
| 77 | 1226 | 1226 | EIVMTQSPLSLPVTLGQPASISCRSSQSLEHSDGNTYLNWFQQRPGQSPRR |
| | | | LIYKVSNRDSGVPDRFSGSGSGTDFTLKINRVEAEDVGVYYCMESTHWP |
| | | | PYTFGQGTKVEIK |
| 77 | 1227 | 1227 | RSSQSLEHSDGNTYLN |
| 77 | 1228 | 1228 | AGGTCTAGTCAAAGTCTCGAACATAGTGATGGAAACACCTACTTGAAT |
| 77 | 1229 | 1229 | KVSNRDS |
| 77 | 1230 | 1230 | AAGGTTTCTAACCGGGACTCT |
| 77 | 1231 | 1231 | MESTHWPPYT |
| 77 | 1232 | 1232 | ATGGAAAGTACACACTGGCCTCCGTACACT |
| 78 | 1233 | 1233 | CAGGTCCAGCTGGTGCAGTCTGGACCTGAGGTGAAGAAGCCTGGGGC |
| | | | CTCAGTGCGGGTCTCCTGCAAGACTTCTGGTTTCACCTTGTCCCATTA |
| | | | TGGTGTCAGTTGGCTGCGGCAGGCCCCTGGACACGGACTTGAGTGGC |
| | | | TGGGCTGGATCAGCGCTTACAACTATAACACACAATTTGGACACAGA |
| | | | ATGGAGGGCAGGCTCACCATGACCACAGACACTTCCACAGCCTATAT |
| | | | GGACCTGACGAGCCTGACTTCTGACGACACGGCCATATATTACTGTG |
| | | | CGAGAGATTCCCCTTCAGACACAGCGGCAGCACTCCTTGACTTCTGG |
| | | | GGCCAGGGAACCCTGGTCACCGTCTCCTCA |
| 78 | 1234 | 1234 | QVQLVQSGPEVKKPGASVRVSCKTSGFTLSHYGVSWLRQAPGHGLEWL |
| | | | GWISAYNYNTQFGHRMEGRLTMTTDTSTAYMDLTSLTSDDTAIYYCAR |
| | | | DSPSDTAAALLDFWGQGTLVTVSS |
| 78 | 1235 | 1235 | FTLSHYGVS |
| 78 | 1236 | 1236 | TTCACCTTGTCCCATTATGGTGTCAGT |
| 78 | 1237 | 1237 | WISAYNYNTQFGHRMEG |
| 78 | 1238 | 1238 | TGGATCAGCGCTTACAACTATAACACACAATTTGGACACAGAATGGA |
| | | | GGGC |
| 78 | 1239 | 1239 | ARDSPSDTAAALLDF |
| 78 | 1240 | 1240 | GCGAGAGATTCCCCTTCAGACACAGCGGCAGCACTCCTTGACTTC |
| 78 | 1241 | 1241 | GATATTGTGCTGACTCAGTCTCCCCTCTCCCTGCCCGTCACTCTTGGA |
| | | | CAGCCGGCCTCCATCTCCTGCAGGTCTAGTCAAAGCCTCGTATACAGT |
| | | | GATGGCAACACCTACTTGAGTTGGTTTCAGCAGAGGCCAGGCCAAGC |
| | | | TCCAAGGCGCCTAATTTATAAGATTTCTAACCGAGACTCTGGGGTCCC |
| | | | AGACAGATTCAGCGGCAGTGGGTCAGGCACTGATTTCACACTAAAGA |
| | | | TCAGCAGGGTGGAGGCTGAGGATGTTGGGATTTATTACTGCATGCAA |
| | | | GCTACACACTGGCCTCGTCTCAGTTTCGGCGGAGGGACCAAGGTGGA |
| | | | GATCAAA |
| 78 | 1242 | 1242 | DIVLTQSPLSLPVTLGQPASISCRSSQSLVYSDGNTYLSWFQQRPGQAPRR |
| | | | LIYKISNRDSGVPDRFSGSGSGTDFTLKISRVEAEDVGIYYCMQATHWPR |
| | | | LSFGGGTKVEIK |
| 78 | 1243 | 1243 | RSSQSLVYSDGNTYLS |
| 78 | 1244 | 1244 | AGGTCTAGTCAAAGCCTCGTATACAGTGATGGCAACACCTACTTGAGT |
| 78 | 1245 | 1245 | KISNRDS |
| 78 | 1246 | 1246 | AAGATTTCTAACCGAGACTCT |
| 78 | 1247 | 1247 | MQATHWPRLS |
| 78 | 1248 | 1248 | ATGCAAGCTACACACTGGCCTCGTCTCAGT |
| 79 | 1249 | 1249 | GAGGTGCAGCTGGTGGAGTCTGGGGCTGAAATGAAGCAGCCTGGGGC |
| | | | CTCAGTGAAAGTCTCCTGCGAGGGTTTTGGAAACACTCTCAGTGAAA |
| | | | GATCCATACACTGGGTGCGACAGGCTCCAGGAAAAGGGCCTGAGTGG |
| | | | ATGGGAGATTATGATCATGAAGATAAAGAAGCAATCTACGCACCGAA |
| | | | GTTCCAGGGCAGACTCACAATAAGCGCGGACATGTCTACAGACATAG |
| | | | CCTCCTTGGAGCTGAACAGCCTGACATCAGAAGACACAGCCGTCTAT |
| | | | TATTGTGCGACAGTGATCGCTGTGGGGGCTTATGACATCTGGGGCCA |
| | | | GGGAACCCTGGTCACCGTCTCCTCA |
| 79 | 1250 | 1250 | EVQLVESGAEMKQPGASVKVSCEGFGNTLSERSIHWVRQAPGKGPEWM |
| | | | GDYDHEDKEAIYAPKFQGRLTISADMSTDIASLELNSLTSEDTAVYYCAT |
| | | | VIAVGAYDIWGQGTLVTVSS |
| 79 | 1251 | 1251 | NTLSERSIH |
| 79 | 1252 | 1252 | AACACTCTCAGTGAAAGATCCATACAC |
| 79 | 1253 | 1253 | DYDHEDKEAIYAPKFQG |
| 79 | 1254 | 1254 | GATTATGATCATGAAGATAAAGAAGCAATCTACGCACCGAAGTTCCA |
| | | | GGGC |
| 79 | 1255 | 1255 | ATVIAVGAYDI |
| 79 | 1256 | 1256 | GCGACAGTGATCGCTGTGGGGGCTTATGACATC |
| 79 | 1257 | 1257 | GAAATTGTATTGACACAGTCTCCATCCTCCCTGTATGCGTCTATAGGG |
| | | | GACAGAGTCACCATCACTTGCCGGACTGGTCAGAGCATTTCCCGGTA |
| | | | TTTGAATTGGTATCAGCAGAAACCTGGGAAAGCCCCTAAACTCCTGA |
| | | | TCTATGCAGCATCCACTTTGCAAAGTGGGGTCCCATCACGTTTCAGTG |
| | | | GCAGTGGCGCTGGGACAGATTTCACTCTCACCATCAGAGGTCTGCTA |
| | | | CCTGAAGATTTTGCAACTTACTTCTGTCAACAGAGTTACATTATCCCC |
| | | | TACACTTTTGGCCAGGGGACCAAGGTGGAAATCAAA |
| 79 | 1258 | 1258 | EIVLTQSPSSLYASIGDRVTITCRTGQSISRYLNWYQQKPGKAPKLLIYAA |
| | | | STLQSGVPSRFSGSGAGTDFTLTIRGLLPEDFATYFCQQSYIIPYTFGQGTK |
| | | | VEIK |
| 79 | 1259 | 1259 | RTGQSISRYLN |
| 79 | 1260 | 1260 | CGGACTGGTCAGAGCATTTCCCGGTATTTGAAT |
| 79 | 1261 | 1261 | AASTLQS |
| 79 | 1262 | 1262 | GCAGCATCCACTTTGCAAAGT |
| 79 | 1263 | 1263 | QQSYIIPYT |
| 79 | 1264 | 1264 | CAACAGAGTTACATTATCCCCTACACT |
| 80 | 1265 | 1265 | CAGGTGCAGCTACAGCAGTGGGGCGCAGGACTGGTGAAGCCTTCGGA |
| | | | GACCCTGTCCCTCACCTGCGCTGTGTATGGTGGGTCCTTCAGTGGTTA |
| | | | CCAGTGGCACTGGTTCCGCCAGCCCCCAGGGAAGGGTCTGGAGTGGA |
| | | | TTGGGGAAATCAATCATAGTGAAATCACCCACTACAACGCGTCCCTC |
| | | | AAGAGTCGAGTCACCCTATCTATTGACACGTCCAAGAACCAATTCTCC |
| | | | CTGAACCTGACCTCTGTGACCGCCGCGGACACGGCTGTTTATTACTGT |
| | | | GCGAGAGCCTCGAGTGGGAGCTATAACTTCGAATACTGGTTCGACCC |
| | | | CTGGGGCCAGGGAACCCTGGTCACCGTCTCCTCA |
| 80 | 1266 | 1266 | QVQLQQWGAGLVKPSETLSLTCAVYGGSFSGYQWHWFRQPPGKGLEWI |
| | | | GEINHSEITHYNASLKSRVTLSIDTSKNQFSLNLTSVTAADTAVYYCARA |
| | | | SSGSYNFEYWFDPWGQGTLVTVSS |
| 80 | 1267 | 1267 | GSFSGYQWH |
| 80 | 1268 | 1268 | GGGTCCTTCAGTGGTTACCAGTGGCAC |
| 80 | 1269 | 1269 | EINHSEITHYNASLKS |
| 80 | 1270 | 1270 | GAAATCAATCATAGTGAAATCACCCACTACAACGCGTCCCTCAAGAGT |
| 80 | 1271 | 1271 | ARASSGSYNFEYWFDP |
| 80 | 1272 | 1272 | GCGAGAGCCTCGAGTGGGAGCTATAACTTCGAATACTGGTTCGACCCC |
| 80 | 1273 | 1273 | CAGTCTGTGCTGACGCAGCCGCCCTCGGTGTCCGTGGCCCCAGGAAA |
| | | | GACGGCCTGGCTTACCTGTGGGGGAAACAACATTGGCAGTAAGAGAG |
| | | | TGCACTGGTACCGGCAGAAGCCAGGCCAGGCCCCTGTGCTGGTCGTT |
| | | | TATGATGATTACGACCGGCCCTCAGGGACCCCTGAGCGAGTCTCTGG |
| | | | CTCCAACTCTGGGAACACGGCCACCCTGACCATCAGCAGGGTCGAAG |
| | | | ACGGGGATGAGGGCGACTATTATTGTCAGGTGTGGGATGATCCCAGT |
| | | | GATCATGCGGTGTTCGGCGGCGGGACCAAGCTGACCGTCCTA |
| 80 | 1274 | 1274 | QSVLTQPPSVSVAPGKTAWLTCGGNNIGSKRVHWYRQKPGQAPVLVVY |
| | | | DDYDRPSGTPERVSGSNSGNTATLTISRVEDGDEGDYYCQVWDDPSDHA |
| | | | VFGGGTKLTVL |
| 80 | 1275 | 1275 | GGNNIGSKRVH |
| 80 | 1276 | 1276 | GGGGGAAACAACATTGGCAGTAAGAGAGTGCAC |
| 80 | 1277 | 1277 | DDYDRPS |
| 80 | 1278 | 1278 | GATGATTACGACCGGCCCTCA |
| 80 | 1279 | 1279 | QVWDDPSDHAV |
| 80 | 1280 | 1280 | CAGGTGTGGGATGATCCCAGTGATCATGCGGTG |
| 81 | 1281 | 1281 | CAGGTCCAGCTTGTGCAGTCTGGAACTGAGGTTAAGAAGCCTGGGGC |
| | | | CTCAGTGAAGGTCTCCTGCTTGACTTCTGGCTACACCTTTACACACTT |
| | | | TGGTATCAGCTGGGTGCGACAGGCCCCAGGACAAGGGCTTGAGTGGA |
| | | | TGGGATGGTTCAGCGCTTACAATGGTAACACAAAGTATGCACAGAAG |
| | | | TTCCAGGGCAGAATCACCCTCACCATAGACACATCCACGAGCATCGC |
| | | | CTACTTGGAACTGAGGAGCCTGAGATCTGACGACACGGCCGTATATT |
| | | | ATTGTGCGAGAGACCCCCCGAGTCTGACAGCAGCTGGTACTCTGGAC |
| | | | TACTGGGGCCAGGGAACCCTGGTCACCGTCTCCTCA |
| 81 | 1282 | 1282 | QVQLVQSGTEVKKPGASVKVSCLTSGYTFTHFGISWVRQAPGQGLEWM |
| | | | GWFSAYNGNTKYAQKFQGRITLTIDTSTSIAYLELRSLRSDDTAVYYCAR |
| | | | DPPSLTAAGTLDYWGQGTLVTVSS |
| 81 | 1283 | 1283 | YTFTHFGIS |
| 81 | 1284 | 1284 | TACACCTTTACACACTTTGGTATCAGC |
| 81 | 1285 | 1285 | WFSAYNGNTKYAQKFQG |
| 81 | 1286 | 1286 | TGGTTCAGCGCTTACAATGGTAACACAAAGTATGCACAGAAGTTCCA |
| | | | GGGC |
| 81 | 1287 | 1287 | ARDPPSLTAAGTLDY |
| 81 | 1288 | 1288 | GCGAGAGACCCCCCGAGTCTGACAGCAGCTGGTACTCTGGACTAC |
| 81 | 1289 | 1289 | GACATCCGGTTGACCCAGTCTCCACTCTCCCTGCCCGTCACCCTTGGA |
| | | | CAGCCGGCCTCCATCTCCTGCAGCTCTAATCAAAGCCTCGTATACAGT |
| | | | GATGGAAACACCTACTTGAGTTGGTTTCAGCAGAGGCCAGGCCAATC |
| | | | TCCAAGGCGCCTAATTTATAAGGTTTCTGATCGGGACTCTGGGGTCCC |
| | | | AGACAGATTCAGCGGCAGTGGGTCAGGCACTGATTTCACACTGAAAA |
| | | | TCAGCAGGGTGGAGGCTGAGGATGTTGGGGTTTATTACTGCATGCAA |
| | | | GCTACAGACTGGCCCCGGACGTTCGGCCAAGGGACCAAGGTGGAGAT |
| | | | CAAA |
| 81 | 1290 | 1290 | DIRLTQSPLSLPVTLGQPASISCSSNQSLVYSDGNTYLSWFQQRPGQSPRR |
| | | | LIYKVSDRDSGVPDRFSGSGSGTDFTLKISRVEAEDVGVYYCMQATDWP |
| | | | RTFGQGTKVEIK |
| 81 | 1291 | 1291 | SSNQSLVYSDGNTYLS |
| 81 | 1292 | 1292 | AGCTCTAATCAAAGCCTCGTATACAGTGATGGAAACACCTACTTGAGT |
| 81 | 1293 | 1293 | KVSDRDS |
| 81 | 1294 | 1294 | AAGGTTTCTGATCGGGACTCT |
| 81 | 1295 | 1295 | MQATDWPRT |
| 81 | 1296 | 1296 | ATGCAAGCTACAGACTGGCCCCGGACG |
| 82 | 1297 | 1297 | GAGGTGCAGCTGGTGGAGTCTGGGGCTGAGGTGAAGAAGCCTGGGG |
| | | | ACTCAGTGAAGGTCTCCTGCAGGGCTTCTGGATACAGCTTCACCGGCC |
| | | | CCTTTTTGCACTGGGTGCGACAGGCCCCTGGACAGCGGCTTGAGCAC |
| | | | ATGGGATGGATCAACCCTAGAAGTGGTGAAACAAAATATGCACAGTC |
| | | | CTTTCTGGGCAGGGTCACCATGACCAGGGACACGTCCATTCGCTCAG |
| | | | CCACCTTGGAATTGAGTAGCCTGAGATCTGACGACACGGCCGTGTAT |
| | | | TATTGTGCGAGAGACCTCTATAGCAGTGGCTGGCTCGACAACTGGGG |
| | | | CCAGGGAACCCTGGTCACCGTCTCCTCA |
| 82 | 1298 | 1298 | EVQLVESGAEVKKPGDSVKVSCRASGYSFTGPFLHWVRQAPGQRLEHM |
| | | | GWINPRSGETKYAQSFLGRVTMTRDTSIRSATLELSSLRSDDTAVYYCAR |
| | | | DLYSSGWLDNWGQGTLVTVSS |
| 82 | 1299 | 1299 | YSFTGPFLH |
| 82 | 1300 | 1300 | TACAGCTTCACCGGCCCCTTTTTGCAC |
| 82 | 1301 | 1301 | WINPRSGETKYAQSFLG |
| 82 | 1302 | 1302 | TGGATCAACCCTAGAAGTGGTGAAACAAAATATGCACAGTCCTTTCT |
| | | | GGGC |
| 82 | 1303 | 1303 | ARDLYSSGWLDN |
| 82 | 1304 | 1304 | GCGAGAGACCTCTATAGCAGTGGCTGGCTCGACAAC |
| 82 | 1305 | 1305 | GAAACGACACTCACGCAGTCTCCAGCCACCCTGTCTGTGTCTCCAGG |
| | | | GGAAAGGGCCACCCTCTCCTGCAGGGCCAGTCAGGGTCTTAGCAGCA |
| | | | ACTTAGCCTGGTACCAGCACAAACCTGGCCAGGCTCCCAGGCTCCTC |
| | | | GTCTATGGTGTTGCCACCAGGGCCACTGGTGTCCCAGCCAGGTTCAGT |
| | | | GGCAGTGGGTCTGGGACAGAGTTCACTCTCACCATCAGCAGCCTGCA |
| | | | GTCTGACGATTTTGCACTTTATTACTGTCATCAGTATAATGACTGGCC |
| | | | CTACACTTTTGGCCAGGGGACCAAGCTGGAGATCAAA |
| 82 | 1306 | 1306 | ETTLTQSPATLSVSPGERATLSCRASQGLSSNLAWYQHKPGQAPRLLVY |
| | | | GVATRATGVPARFSGSGSGTEFTLTISSLQSDDFALYYCHQYNDWPYTF |
| | | | GQGTKLEIK |
| 82 | 1307 | 1307 | RASQGLSSNLA |
| 82 | 1308 | 1308 | AGGGCCAGTCAGGGTCTTAGCAGCAACTTAGCC |
| 82 | 1309 | 1309 | GVATRAT |
| 82 | 1310 | 1310 | GGTGTTGCCACCAGGGCCACT |
| 82 | 1311 | 1311 | HQYNDWPYT |
| 82 | 1312 | 1312 | CATCAGTATAATGACTGGCCCTACACT |
| 83 | 1313 | 1313 | GAGGTGCAGCTGGTGGAGTCTGGGGGAGGCTTGGTAAAGCCTGGGGG |
| | | | GTCCCTAAGACTCTCATGTGCAGCCTCTGGATTCATCTTCCGCAACGC |
| | | | CTGGATGAGCTGGGTCCGCCAGGCTCCAGGGAAGGGGCTGGAGTGGG |
| | | | TTGGCCGGATTAAAAGGACAAGTGAAGGTGGGTCAGTCGACTACGCG |
| | | | ACACCCGTGCAAGGCAGATTCTCCATCTCAAGAGATGATTCTAGAAA |
| | | | CACGCTGTATCTGCAAATGAACAGCCTGGAAACCGACGACACAGCCG |
| | | | TGTATTACTGTTCCACAGGCCCACCCTACTCTTACTTTGATAGTAGTG |
| | | | GTTATTCGGTCGTGGACTACTGGGGCCAGGGAACCCTGGTCACCGTCT |
| | | | CCTCA |
| 83 | 1314 | 1314 | EVQLVESGGGLVKPGGSLRLSCAASGFIFRNAWMSWVRQAPGKGLEWV |
| | | | GRIKRTSEGGSVDYATPVQGRFSISRDDSRNTLYLQMNSLETDDTAVYY |
| | | | CSTGPPYSYFDSSGYSVVDYWGQGTLVTVSS |
| 83 | 1315 | 1315 | FIFRNAWMS |
| 83 | 1316 | 1316 | TTCATCTTCCGCAACGCCTGGATGAGC |
| 83 | 1317 | 1317 | RIKRTSEGGSVDYATPVQG |
| 83 | 1318 | 1318 | CGGATTAAAAGGACAAGTGAAGGTGGGTCAGTCGACTACGCGACACC |
| | | | CGTGCAAGGC |
| 83 | 1319 | 1319 | STGPPYSYFDSSGYSVVDY |
| 83 | 1320 | 1320 | TCCACAGGCCCACCCTACTCTTACTTTGATAGTAGTGGTTATTCGGTC |
| | | | GTGGACTAC |
| 83 | 1321 | 1321 | CAGTCTGTGTTGACGCAGCCGCCCTCAGCGTCTGGGACCCCCGGGCA |
| | | | GAGGGTCACCATCTCTTGTTCTGCAAGCAGCTCCAACATCGGAGATA |
| | | | ATTATTTCTACTGGTACCAACAACTCCCAGGAAAGGCCCCCACACTCC |
| | | | TCATGTATGGTAGTGATCAGCGGTCCTCAGGGGTCCCTGACCGATTCT |
| | | | CTGGCTCCCAGTCTGGCACCTCTGCCTCCCTGGCCATCAGTGGGCTCC |
| | | | GGTCCGAGGATGAAGCTGATTATTATTGTGCAGCTTGGGATGACAGC |
| | | | CTGAGTGGTCCGGTGTTCGGCGGAGGGACCAAGCTGACCGTCCTA |
| 83 | 1322 | 1322 | QSVLTQPPSASGTPGQRVTISCSASSSNIGDNYFYWYQQLPGKAPTLLMY |
| | | | GSDQRSSGVPDRFSGSQSGTSASLAISGLRSEDEADYYCAAWDDSLSGPV |
| | | | FGGGTKLTVL |
| 83 | 1323 | 1323 | SASSSNIGDNYFY |
| 83 | 1324 | 1324 | TCTGCAAGCAGCTCCAACATCGGAGATAATTATTTCTAC |
| 83 | 1325 | 1325 | GSDQRSS |
| 83 | 1326 | 1326 | GGTAGTGATCAGCGGTCCTCA |
| 83 | 1327 | 1327 | AAWDDSLSGPV |
| 83 | 1328 | 1328 | GCAGCTTGGGATGACAGCCTGAGTGGTCCGGTG |
| 84 | 1329 | 1329 | GAGGTGCAGCTGGTGGAGTCTGGGGGAGGCTTGGTACAGCCTGGGGG |
| | | | GTCCCTGAGACTCTCGTGTGCAGCCTCTGGATTCTCCTTCAGTGACTA |
| | | | CAGCATGAACTGGGTCCGCCAGGCTCCAGGGAAGGGGCTGGAGTGG |
| | | | GTTTCATATATTACTCCTAGTAGTAGAAATAAATTCTATGCAGACTCT |
| | | | GTGAGGGGCCGATTCACCATCTCCAGAGACAATGCCGAGAATTCACT |
| | | | GTATCTGCAAATGAACAGCCTGAGAGTCGAAGACACGGCTGTTTATT |
| | | | ACTGTGTCAGAAGTTTGCATTGGGGCGCCGCGATCGAGAGATGGGAC |
| | | | GTCTGGGGCCAAGGGACCACGGTCACCGTCTCCTCA |
| 84 | 1330 | 1330 | EVQLVESGGGLVQPGGSLRLSCAASGFSFSDYSMNWVRQAPGKGLEWV |
| | | | SYITPSSRNKFYADSVRGRFTISRDNAENSLYLQMNSLRVEDTAVYYCVR |
| | | | SLHWGAAIERWDVWGQGTTVTVSS |
| 84 | 1331 | 1331 | FSFSDYSMN |
| 84 | 1332 | 1332 | TTCTCCTTCAGTGACTACAGCATGAAC |
| 84 | 1333 | 1333 | YITPSSRNKFYADSVRG |
| 84 | 1334 | 1334 | TATATTACTCCTAGTAGTAGAAATAAATTCTATGCAGACTCTGTGAGG |
| | | | GGC |
| 84 | 1335 | 1335 | VRSLHWGAAIERWDV |
| 84 | 1336 | 1336 | GTCAGAAGTTTGCATTGGGGCGCCGCGATCGAGAGATGGGACGTC |
| 84 | 1337 | 1337 | GAAATTGTATTGACGCAGTCTCCAGGCACCCTGTCGTTGTCTCCAGGG |
| | | | GAAAGAGCCACCCTCTCCTGCAGGGCCAGTCAGAGTATTAGCAGCAG |
| | | | CTTCTTTGCCTGGTACCAGCAGACACCTGGCCAGGCCCCCAGACTCCT |
| | | | CATGTATGCTACATCCAGCAGGGCCACTGGCATCCCAGACAGGTTCA |
| | | | GTGGCAGTGGGTCTGGGACAGACTTCACTCTCACCATCAGCAGAGTG |
| | | | GAGCCTGAAGATTTTGCAGTGTATTACTGTCAGCAGTCTGGCAGTTCA |
| | | | CCGTACACTTTTGGCCAGGGGACCAAGGTGGAAATCAAA |
| 84 | 1338 | 1338 | EIVLTQSPGTLSLSPGERATLSCRASQSISSSFFAWYQQTPGQAPRLLMYA |
| | | | TSSRATGIPDRFSGSGSGTDFTLTISRVEPEDFAVYYCQQSGSSPYTFGQG |
| | | | TKVEIK |
| 84 | 1339 | 1339 | RASQSISSSFFA |
| 84 | 1340 | 1340 | AGGGCCAGTCAGAGTATTAGCAGCAGCTTCTTTGCC |
| 84 | 1341 | 1341 | ATSSRAT |
| 84 | 1342 | 1342 | GCTACATCCAGCAGGGCCACT |
| 84 | 1343 | 1343 | QQSGSSPYT |
| 84 | 1344 | 1344 | CAGCAGTCTGGCAGTTCACCGTACACT |
| 85 | 1345 | 1345 | GAGGTGCAGCTGTTGGAGTCGGGGGGAGGCGTGGTCCAGCCTGGGAG |
| | | | GTCCCTGAGACTCTCCTGTACAGCCTCTGGATTCACCTTCAGTGACCA |
| | | | TGCTATGTACTGGGTCCGCCAGGCTCCAGGCAAAGGGCTAGAGTGGG |
| | | | TGGCACTTATATCATTTGATGGAAGGAATATATACTACGCAGACTCCG |
| | | | TGAAGGGCCGATTCACCATCTCCAGAGACAATTCCAAGAACACGCTG |
| | | | TATCTGCAGATGAACAGCCTGAGAGCTGAGGACACGGCTGTCTATTA |
| | | | CTGTGCGAGAGATCAATGGCTGGTTCCTGACTACTGGGGCCAGGGAA |
| | | | CCCTGGTCACCGTCTCCTCA |
| 85 | 1346 | 1346 | EVQLLESGGGVVQPGRSLRLSCTASGFTFSDHAMYWVRQAPGKGLEWV |
| | | | ALISFDGRNIYYADSVKGRFTISRDNSKNTLYLQMNSLRAEDTAVYYCA |
| | | | RDQWLVPDYWGQGTLVTVSS |
| 85 | 1347 | 1347 | FTFSDHAMY |
| 85 | 1348 | 1348 | TTCACCTTCAGTGACCATGCTATGTAC |
| 85 | 1349 | 1349 | LISFDGRNIYYADSVKG |
| 85 | 1350 | 1350 | CTTATATCATTTGATGGAAGGAATATATACTACGCAGACTCCGTGAA |
| | | | GGGC |
| 85 | 1351 | 1351 | ARDQWLVPDY |
| 85 | 1352 | 1352 | GCGAGAGATCAATGGCTGGTTCCTGACTAC |
| 85 | 1353 | 1353 | CAGTCTGTTCTGATTCAGCCTGCCTCCGTGTCTGGGTCTCCTGGACAG |
| | | | TCGATCACCATCTCCTGCACTGGAACCAGCAGTGACGTTGGTGGTTAT |
| | | | AACTATGTCTCCTGGTACCAACAGCACCCAGGCAACGCCCCCAAACT |
| | | | CATGATTTATGAAGTCAGTAAGCGGCCCTCAGGGGTCCCTGATCGCTT |
| | | | CTCTGGCTTCAAGTCTGGCAACACGGCCTCCCTGACCGTCTCTGGGCT |
| | | | CCAGGCTGAGGATGAGGCTGATTATTACTGCAGCTCATATGCAGGCA |
| | | | GCAACAGTGTCTTCGGAACTGGCACCCAGCTGACCGTCCTC |
| 85 | 1354 | 1354 | QSVLIQPASVSGSPGQSITISCTGTSSDVGGYNYVSWYQQHPGNAPKLMI |
| | | | YEVSKRPSGVPDRFSGFKSGNTASLTVSGLQAEDEADYYCSSYAGSNSV |
| | | | FGTGTQLTVL |
| 85 | 1355 | 1355 | TGTSSDVGGYNYVS |
| 85 | 1356 | 1356 | ACTGGAACCAGCAGTGACGTTGGTGGTTATAACTATGTCTCC |
| 85 | 1357 | 1357 | EVSKRPS |
| 85 | 1358 | 1358 | GAAGTCAGTAAGCGGCCCTCA |
| 85 | 1359 | 1359 | SSYAGSNSV |
| 85 | 1360 | 1360 | AGCTCATATGCAGGCAGCAACAGTGTC |
| 86 | 1361 | 1361 | GAGGTGCAGCTGGTGGAGTCGGGCCCAGGACTAGTTAGGCCTTCACA |
| | | | GACCCTGTCCATAAAGTGCAGTGTCTCTGGCGGCTCCATCAATAGAG |
| | | | GTGCTTACTTCTGGACCTGGATCCGCCAGCGCCCAGGGAAGGGCCTG |
| | | | GAGTGGATTGGGTCCATCCATGACACCGGCAGCTACTACAACCCGTC |
| | | | CCTCAAGACACGAGTTTCCATCTCCGGGGACACGTCTAAAAACCTCTT |
| | | | CACCCTGGAGTTGACCTCGCTGACTGCCGCGGACACGGCCGTGTATT |
| | | | ACTGTGCGAGGGGGCGTGGATACAGCTATGGCTGGCGTTACTTTGAC |
| | | | TCCTGGGGCCAGGGAACCCTGGTCACCGTCTCCTCA |
| 86 | 1362 | 1362 | EVQLVESGPGLVRPSQTLSIKCSVSGGSINRGAYFWTWIRQRPGKGLEWI |
| | | | GSIHDTGSYYNPSLKTRVSISGDTSKNLFTLELTSLTAADTAVYYCARGR |
| | | | GYSYGWRYFDSWGQGTLVTVSS |
| 86 | 1363 | 1363 | GSINRGAYFWT |
| 86 | 1364 | 1364 | GGCTCCATCAATAGAGGTGCTTACTTCTGGACC |
| 86 | 1365 | 1365 | SIHDTGSYYNPSLKT |
| 86 | 1366 | 1366 | TCCATCCATGACACCGGCAGCTACTACAACCCGTCCCTCAAGACA |
| 86 | 1367 | 1367 | ARGRGYSYGWRYFDS |
| 86 | 1368 | 1368 | GCGAGGGGGCGTGGATACAGCTATGGCTGGCGTTACTTTGACTCC |
| 86 | 1369 | 1369 | TCCTATGTGCTGACTCAGCCACCCTCGGTGTCAGTGTCTCCAGGACAG |
| | | | ACGGCCAGGATCACCTGCTCTGGCGATGCATTCCCAAGACAATATTCT |
| | | | TATTGGTACCAGCAGAAGGCAGGCCAGCCCCCTGTGTTGGTAATATT |
| | | | GAAAGACTCTGAGAGGCCCTCAGGGATCCCTGCGCGATTCTCTGGCT |
| | | | CCACCTCAGGGACAACAGTCACCTTGACCATCACTGGAGTCCAGGCA |
| | | | GAAGACGAGGCAGACTATTACTGTCAATCATCGGACAGCAGTGGAAA |
| | | | TTATGTGGTGTTCGGCGGAGGGACCAAGCTCACCGTCCTA |
| 86 | 1370 | 1370 | SYVLTQPPSVSVSPGQTARITCSGDAFPRQYSYWYQQKAGQPPVLVILKD |
| | | | SERPSGIPARFSGSTSGTTVTLTITGVQAEDEADYYCQSSDSSGNYVVFGG |
| | | | GTKLTVL |
| 86 | 1371 | 1371 | SGDAFPRQYSY |
| 86 | 1372 | 1372 | TCTGGCGATGCATTCCCAAGACAATATTCTTAT |
| 86 | 1373 | 1373 | KDSERPS |
| 86 | 1374 | 1374 | AAAGACTCTGAGAGGCCCTCA |
| 86 | 1375 | 1375 | QSSDSSGNYVV |
| 86 | 1376 | 1376 | CAATCATCGGACAGCAGTGGAAATTATGTGGTG |
| 87 | 1377 | 1377 | CAGGTCCAGCTTGTGCAGTCTGGGGCTGAATTGAAGAGGCCTGGGTC |
| | | | ATCGGTGAAGGTCTCCTGCAAGGCTTCAGGGGTCTATTTGACCTCGGT |
| | | | TGCTGTCAACTGGGTGCGACAGGTCCCTGGACATGGGTTCGAGTGGA |
| | | | TGGGTGGGATACTCACTGGCTTTGGTAAAGTCAGACACGCCCAGGCC |
| | | | TTTGAGAACCGTGCCACGCTCACCGCGGACGCGTCGACCAACACAGC |
| | | | CTACTTGGAGTTGAGCGGACTTCAAGCTGAAGACACGGCCGCCTATT |
| | | | ATTGTGCGATAATCGACCCCCAAGATTGTACGGCCGCCAGCTGCTTTT |
| | | | GGGTCAACTGGCTCGACCCCTGGGGCCAGGGAACCCTGGTCACCGTC |
| | | | TCCTCA |
| 87 | 1378 | 1378 | QVQLVQSGAELKRPGSSVKVSCKASGVYLTSVAVNWVRQVPGHGFEW |
| | | | MGGILTGFGKVRHAQAFENRATLTADASTNTAYLELSGLQAEDTAAYY |
| | | | CAIIDPQDCTAASCFWVNWLDPWGQGTLVTVSS |
| 87 | 1379 | 1379 | VYLTSVAVN |
| 87 | 1380 | 1380 | GTCTATTTGACCTCGGTTGCTGTCAAC |
| 87 | 1381 | 1381 | GILTGFGKVRHAQAFEN |
| 87 | 1382 | 1382 | GGGATACTCACTGGCTTTGGTAAAGTCAGACACGCCCAGGCCTTTGA |
| | | | GAAC |
| 87 | 1383 | 1383 | AIIDPQDCTAASCFWVNWLDP |
| 87 | 1384 | 1384 | GCGATAATCGACCCCCAAGATTGTACGGCCGCCAGCTGCTTTTGGGTC |
| | | | AACTGGCTCGACCCC |
| 87 | 1385 | 1385 | GAAATTGTATTGACACAGTCTCCAGGCACCCTGACCGTGTCTCCAGG |
| | | | GGAGAGAGCCACCCTCTCCTGCAGGGCCAGTCAGAGTGTTCTTAGTA |
| | | | GTCACTTAGCCTGGTACCAGCAGAAACCTGGCCAGGCTCCCAGGCTC |
| | | | CTCATCTATGCTGCATCCAGTAGGGCCACTGACGTCCCAGACAGGTTC |
| | | | AGTGGCAGTGGGTCTGGGACAGACTTCACTCTCACCATCAGCAGACT |
| | | | GGAGCCTCAAGATTTTGCAGTCTATTACTGTCAGCAGTATGGTTCCTC |
| | | | TCCGATCACCTTCGGCCAAGGGACACGACTGGAGATTAAA |
| 87 | 1386 | 1386 | EIVLTQSPGTLTVSPGERATLSCRASQSVLSSHLAWYQQKPGQAPRLLIY |
| | | | AASSRATDVPDRFSGSGSGTDFTLTISRLEPQDFAVYYCQQYGSSPITFGQ |
| | | | GTRLEIK |
| 87 | 1387 | 1387 | RASQSVLSSHLA |
| 87 | 1388 | 1388 | AGGGCCAGTCAGAGTGTTCTTAGTAGTCACTTAGCC |
| 87 | 1389 | 1389 | AASSRAT |
| 87 | 1390 | 1390 | GCTGCATCCAGTAGGGCCACT |
| 87 | 1391 | 1391 | QQYGSSPIT |
| 87 | 1392 | 1392 | CAGCAGTATGGTTCCTCTCCGATCACC |
| 88 | 1393 | 1393 | CAGGTCCAGCTGGTGCAGTCTGGGGCTGAGGTGAAGAAGCCTGGGTC |
| | | | CTCGGTGAAGGTCTCCTGTAAGGTTGCCGGAGGTTCCTTCTCCAATTA |
| | | | TGCAATCGCCTGGCTGCGACAGGCCCCTGGACAAGGGCTTGAGTGGA |
| | | | TGGGAGGGATCATACCTGCCTTTAATAGAGCAATGTATGCACGGAAG |
| | | | TTCCAAGACAGAGTCACAATTACCGCGTACGCATCAACGACCACTGC |
| | | | CTACCTGGACATTACCGGCCTCAGATCTGAGGACACGGCCCTTTATTA |
| | | | TTGTGCGAGGCCTGCTGGAGACTTTGGGGATTTAAAGTGGGTACGAT |
| | | | CGCCTTTTGACTACTGGGGCCAGGGAACCCTGGTCACCGTCTCCTCA |
| 88 | 1394 | 1394 | QVQLVQSGAEVKKPGSSVKVSCKVAGGSFSNYAIAWLRQAPGQGLEW |
| | | | MGGIIPAFNRAMYARKFQDRVTITAYASTTTAYLDITGLRSEDTALYYCA |
| | | | RPAGDFGDLKWVRSPFDYWGQGTLVTVSS |
| 88 | 1395 | 1395 | GSFSNYAIA |
| 88 | 1396 | 1396 | GGTTCCTTCTCCAATTATGCAATCGCC |
| 88 | 1397 | 1397 | GIIPAFNRAMYARKFQD |
| 88 | 1398 | 1398 | GGGATCATACCTGCCTTTAATAGAGCAATGTATGCACGGAAGTTCCA |
| | | | AGAC |
| 88 | 1399 | 1399 | ARPAGDFGDLKWVRSPFDY |
| 88 | 1400 | 1400 | GCGAGGCCTGCTGGAGACTTTGGGGATTTAAAGTGGGTACGATCGCC |
| | | | TTTTGACTAC |
| 88 | 1401 | 1401 | GAAACGACACTCACGCAGTCTCCAGGCACCCTGTCTGTGTCTCCAGG |
| | | | GGAAAGAGCCACCCTCTCCTGCAGGGCCAGTCAGGAAGTTGGCATCA |
| | | | ACTTAGCCTGGTATCAGCAGAAACCTGGCCAGGCTCCCAGGCTCCTC |
| | | | ATATATGGTGCATCCACCAGGGCCACTGATGTCCCAGCCAGGTTCAG |
| | | | TGGCAGTGGGTCTGGGACAGAGTTCACTCTCACCATCAGCAGCCTGC |
| | | | AGTCTGAAGATTTTGCAGTTTATTATTGTCAGGAGTATAATGACTGGC |
| | | | CTCCCCAGCTCACTTTCGGCCCTGGGACCAAAGTGGATATCAAA |
| 88 | 1402 | 1402 | ETTLTQSPGTLSVSPGERATLSCRASQEVGINLAWYQQKPGQAPRLLIYG |
| | | | ASTRATDVPARFSGSGSGTEFTLTISSLQSEDFAVYYCQEYNDWPPQLTF |
| | | | GPGTKVDIK |
| 88 | 1403 | 1403 | RASQEVGINLA |
| 88 | 1404 | 1404 | AGGGCCAGTCAGGAAGTTGGCATCAACTTAGCC |
| 88 | 1405 | 1405 | GASTRAT |
| 88 | 1406 | 1406 | GGTGCATCCACCAGGGCCACT |
| 88 | 1407 | 1407 | QEYNDWPPQLT |
| 88 | 1408 | 1408 | CAGGAGTATAATGACTGGCCTCCCCAGCTCACT |
| 89 | 1409 | 1409 | GAGGTGCAGCTGGTGGAGTCTGGGGGAGGCTTGGTAAAGCCTGGGGG |
| | | | GTCCCTAAGACTCTCATGTGCAGCCTCTGGATTCATCTTCCGCAACGC |
| | | | CTGGATGAGCTGGGTCCGCCAGGCTCCAGGGAAGGGGCTGGAGTGGG |
| | | | TTGGCCGGATTAAAAGGACAAGTGAAGGTGGGTCAGTCGACTACGCG |
| | | | ACACCCGTGCAAGGCAGATTCTCCATCTCAAGAGATGATTCTAGAAA |
| | | | CACGCTGTATCTGCAAATGAACAGCCTGGAAACCGACGACACAGCCG |
| | | | TGTATTACTGTTCCACAGGCCCACCCTATTCTTACTTTGATAGTAGTG |
| | | | GTTATTCGGTCGTGGACTACTGGGGCCAGGGAACCCTGGTCACCGTCT |
| | | | CCTCA |
| 89 | 1410 | 1410 | EVQLVESGGGLVKPGGSLRLSCAASGFIFRNAWMSWVRQAPGKGLEWV |
| | | | GRIKRTSEGGSVDYATPVQGRFSISRDDSRNTLYLQMNSLETDDTAVYY |
| | | | CSTGPPYSYFDSSGYSVVDYWGQGTLVTVSS |
| 89 | 1411 | 1411 | FIFRNAWMS |
| 89 | 1412 | 1412 | TTCATCTTCCGCAACGCCTGGATGAGC |
| 89 | 1413 | 1413 | RIKRTSEGGSVDYATPVQG |
| 89 | 1414 | 1414 | CGGATTAAAAGGACAAGTGAAGGTGGGTCAGTCGACTACGCGACACC |
| | | | CGTGCAAGGC |
| 89 | 1415 | 1415 | STGPPYSYFDSSGYSVVDY |
| 89 | 1416 | 1416 | TCCACAGGCCCACCCTATTCTTACTTTGATAGTAGTGGTTATTCGGTC |
| | | | GTGGACTAC |
| 89 | 1417 | 1417 | CAGTCTGTCGTGACGCAGCCGCCCTCAGTGTCTGGGACCCCCGGGCA |
| | | | GAGGGTCACCATCTCCTGCACTGGGAGCTCCTCCAACATCGGGACAC |
| | | | CTTTTGATGTACACTGGTACCAGCAGATTCCAGAGACAGCCCCCAAA |
| | | | CTCATCATATCTGGTGGTTTCAGTCGGCCCTCAGGGGTCCCTGACCGA |
| | | | TTCTCTGGCTCCCAGTCTGGCACCTCTGCCTCCCTGGCCATCAGTGGG |
| | | | CTCCGGTCCGAGGATGAAGGTGATTATTATTGTGCAGCTTGGGATGA |
| | | | CAGCCTGAGTGGTCCGGTGTTCGGCGGAGGGACCAAGCTCACCGTCC |
| | | | TA |
| 89 | 1418 | 1418 | QSVVTQPPSVSGTPGQRVTISCTGSSSNIGTPFDVHWYQQIPETAPKLIISG |
| | | | GFSRPSGVPDRFSGSQSGTSASLAISGLRSEDEGDYYCAAWDDSLSGPVF |
| | | | GGGTKLTVL |
| 89 | 1419 | 1419 | TGSSSNIGTPFDVH |
| 89 | 1420 | 1420 | ACTGGGAGCTCCTCCAACATCGGGACACCTTTTGATGTACAC |
| 89 | 1421 | 1421 | GGFSRPS |
| 89 | 1422 | 1422 | GGTGGTTTCAGTCGGCCCTCA |
| 89 | 1423 | 1423 | AAWDDSLSGPV |
| 89 | 1424 | 1424 | GCAGCTTGGGATGACAGCCTGAGTGGTCCGGTG |
| 90 | 1425 | 1425 | CAGGTGCAGCTGGTGCAGTCTGGGGCTGAGGTGAAGAAGCCTGGGTC |
| | | | CTCGGTGAAGGTCTCCTGTAAGGTTGTCGGAGGCAGTTTCAGCAACT |
| | | | ATGGGATTGGCTGGGTGCGACAGGCCCCTGGACAAGGGCCTGAGTGG |
| | | | ATGGGAGGGATCATCCCTGCCTTTAAGACAGCAAAATATGCAAAGAA |
| | | | GTTCCAGGACAGAGTCACAATTACCGCGGACGAATCTTCGAGCACTG |
| | | | CCTACATGGAGGTGAGAGGCCTCAGACCTGACGACACGGCCCTGTAT |
| | | | TATTGTGCGAGGCCTGAAGGAGACTTTGGAGATTTGAAGTGGGTACG |
| | | | ATCGCCTTTTGACTACTGGGGCCAGGGAACCCTGGTCACCGTCTCCTCA |
| 90 | 1426 | 1426 | QVQLVQSGAEVKKPGSSVKVSCKVVGGSFSNYGIGWVRQAPGQGPEW |
| | | | MGGIIPAFKTAKYAKKFQDRVTITADESSSTAYMEVRGLRPDDTALYYC |
| | | | ARPEGDFGDLKWVRSPFDYWGQGTLVTVSS |
| 90 | 1427 | 1427 | GSFSNYGIG |
| 90 | 1428 | 1428 | GGCAGTTTCAGCAACTATGGGATTGGC |
| 90 | 1429 | 1429 | GIIPAFKTAKYAKKFQD |
| 90 | 1430 | 1430 | GGGATCATCCCTGCCTTTAAGACAGCAAAATATGCAAAGAAGTTCCA |
| | | | GGAC |
| 90 | 1431 | 1431 | ARPEGDFGDLKWVRSPFDY |
| 90 | 1432 | 1432 | GCGAGGCCTGAAGGAGACTTTGGAGATTTGAAGTGGGTACGATCGCC |
| | | | TTTTGACTAC |
| 90 | 1433 | 1433 | GAAACGACACTCACGCAGTCTCCAGCCACCCTGTCTGTGTCTCCAGG |
| | | | GGAAAGAGTCACCCTCTCCTGCAGGGCCAGTCAGGATGTTAGCATCA |
| | | | ACTTAGCCTGGTACCAGCAGAAACCTGGCCAGGCTCCCAGGCTCCTC |
| | | | ATCTATGGTGCATCCACCAGGGCCACTGATGTCCCAGCCAGGTTCAGT |
| | | | GGCAGTGGGTCTGGGACAGACTTCACTCTCACCATCAGCAGCCTGCA |
| | | | GTCTGAAGATTTTGCATTTTATTATTGTCAGGAGTATAATGACTGGCC |
| | | | TCCCCAGCTCACTTTCGGCCCTGGGACCAAGGTGGAAATCAAA |
| 90 | 1434 | 1434 | ETTLTQSPATLSVSPGERVTLSCRASQDVSINLAWYQQKPGQAPRLLIYG |
| | | | ASTRATDVPARFSGSGSGTDFTLTISSLQSEDFAFYYCQEYNDWPPQLTF |
| | | | GPGTKVEIK |
| 90 | 1435 | 1435 | RASQDVSINLA |
| 90 | 1436 | 1436 | AGGGCCAGTCAGGATGTTAGCATCAACTTAGCC |
| 90 | 1437 | 1437 | GASTRAT |
| 90 | 1438 | 1438 | GGTGCATCCACCAGGGCCACT |
| 90 | 1439 | 1439 | QEYNDWPPQLT |
| 90 | 1440 | 1440 | CAGGAGTATAATGACTGGCCTCCCCAGCTCACT |
| 91 | 1441 | 1441 | CAGGTCCAGCTGGTGCAGTCTGGGGCTGAGGTGAAGAAGCCTGGGTC |
| | | | ATCGGTGAAGGTCTCCTGCAAGGCCTCAGGAGTCATTTTGACCAGCG |
| | | | TTGCTGTCAGCTGGGTGCGGCAGGCCCCTGGAAAAGGCTTTGAGTGG |
| | | | ATGGGAGGGATTCTTCCTGGCTTTAATAAAGTCAGACACGCCCAGGA |
| | | | TTTTGAGAACAGAGCCACTCACACCGCGGACGCATCTACGAACACAG |
| | | | TCTACATGGAGTTGAGCGGACTGAAATCTGAGGACACGGCCGTCTAT |
| | | | TACTGTGCGATAATCGACCCCCAAGATTGTACTCGTGCCAGTTGCTTT |
| | | | TGGGTCAACTGGCTCGCCCCCTGGGGCCAGGGAACCCTGGTCACCGT |
| | | | CTCCTCA |
| 91 | 1442 | 1442 | QVQLVQSGAEVKKPGSSVKVSCKASGVILTSVAVSWVRQAPGKGFEWM |
| | | | GGILPGFNKVRHAQDFENRATHTADASTNTVYMELSGLKSEDTAVYYC |
| | | | AIIDPQDCTRASCFWVNWLAPWGQGTLVTVSS |
| 91 | 1443 | 1443 | VILTSVAVS |
| 91 | 1444 | 1444 | GTCATTTTGACCAGCGTTGCTGTCAGC |
| 91 | 1445 | 1445 | GILPGFNKVRHAQDFEN |
| 91 | 1446 | 1446 | GGGATTCTTCCTGGCTTTAATAAAGTCAGACACGCCCAGGATTTTGAG |
| | | | AAC |
| 91 | 1447 | 1447 | AIIDPQDCTRASCFWVNWLAP |
| 91 | 1448 | 1448 | GCGATAATCGACCCCCAAGATTGTACTCGTGCCAGTTGCTTTTGGGTC |
| | | | AACTGGCTCGCCCCC |
| 91 | 1449 | 1449 | GAAACGACACTCACGCAGTCTCCCGGCACCCTGACCTTGTCTCCAGG |
| | | | GGAGAGAGCCACCCTGTCCTGCAGGGCCAGTCAGAGTGTTCCTAGCA |
| | | | GGAACTTAGCCTGGTACCAGCAGAAACCTGGCCAGGCTCCCAGGCTC |
| | | | ATCATCTATGCTGCATCCAATAGGGCCACTGACATCCCAGACAGGTTC |
| | | | AGTGGCAGTGGGTCTGGGACAGATTTCACTCTCACCATCAGCAGACT |
| | | | GGAGCCTCAAGATTTTGCAGTGTATTACTGTCAGCAGTATGAAACCTC |
| | | | TCCGATCACCTTCGGCCAAGGGACCAAAGTGGATATCAAA |
| 91 | 1450 | 1450 | ETTLTQSPGTLTLSPGERATLSCRASQSVPSRNLAWYQQKPGQAPRLIIYA |
| | | | ASNRATDIPDRFSGSGSGTDFTLTISRLEPQDFAVYYCQQYETSPITFGQG |
| | | | TKVDIK |
| 91 | 1451 | 1451 | RASQSVPSRNLA |
| 91 | 1452 | 1452 | AGGGCCAGTCAGAGTGTTCCTAGCAGGAACTTAGCC |
| 91 | 1453 | 1453 | AASNRAT |
| 91 | 1454 | 1454 | GCTGCATCCAATAGGGCCACT |
| 91 | 1455 | 1455 | QQYETSPIT |
| 91 | 1456 | 1456 | CAGCAGTATGAAACCTCTCCGATCACC |
| 92 | 1457 | 1457 | GAGGTGCAGCTGGTGGAGTCTGGGGGAGGCTTGGTAAAGCCTGGGGG |
| | | | GTCCCTAAGACTCTCATGTGCAGCCTCTGGATTCATCTTCCGCAACGC |
| | | | CTGGATGAGCTGGGTCCGCCAGGCTCCAGGGAAGGGGCTGGAGTGGG |
| | | | TTGGCCGGATTAAAAGGACAAGTGAAGGTGGGTCAGTCGACTACGCG |
| | | | ACACCCGTGCAAGGCAGATTCTCCATCTCAAGAGATGATTCTAGAAA |
| | | | GACGCTGTATCTGCAAATGAACAGCCTGGAAACCGACGACACAGCCG |
| | | | TGTATTACTGTTCCACAGGCCCACCCTATTCTTACTTTGATAGTAGTG |
| | | | GTTATTCGGTCGTGGACTACTGGGGCCTGGGAACCCTGGTCACCGTCT |
| | | | CCTCA |
| 92 | 1458 | 1458 | EVQLVESGGGLVKPGGSLRLSCAASGFIFRNAWMSWVRQAPGKGLEWV |
| | | | GRIKRTSEGGSVDYATPVQGRFSISRDDSRKTLYLQMNSLETDDTAVYY |
| | | | CSTGPPYSYFDSSGYSVVDYWGLGTLVTVSS |
| 92 | 1459 | 1459 | FIFRNAWMS |
| 92 | 1460 | 1460 | TTCATCTTCCGCAACGCCTGGATGAGC |
| 92 | 1461 | 1461 | RIKRTSEGGSVDYATPVQG |
| 92 | 1462 | 1462 | CGGATTAAAAGGACAAGTGAAGGTGGGTCAGTCGACTACGCGACACC |
| | | | CGTGCAAGGC |
| 92 | 1463 | 1463 | STGPPYSYFDSSGYSVVDY |
| 92 | 1464 | 1464 | TCCACAGGCCCACCCTATTCTTACTTTGATAGTAGTGGTTATTCGGTC |
| | | | GTGGACTAC |
| 92 | 1465 | 1465 | TCCTATGAGCTGACTCAGCCACCCTCAGCGTCTGGGACCCCCGGGCA |
| | | | GAGGGTCACCATCTCTTGTTCTGCAAGCAGCTCCAACATCGGAGATA |
| | | | ATTATTTCTACTGGTACCAACAACTCCCAGGAAAGGCCCCCACACTCC |
| | | | TCATGTATGGTAGTGATCAACGGTCCTCAGGGGTCCCTGACCGATTCT |
| | | | CTGGCTCCCAGTCTGGCACCTCTGCCTCCCTGGCCATCAGTGGGCTCC |
| | | | GGTCCGAGGATGAAGCTGATTATTATTGTGCAGCTTGGGATGACAGC |
| | | | CTGAGTGGTCCGGTGTTCGGCGGAGGCACCCAGCTGACCGTCCTC |
| 92 | 1466 | 1466 | SYELTQPPSASGTPGQRVTISCSASSSNIGDNYFYWYQQLPGKAPTLLMY |
| | | | GSDQRSSGVPDRFSGSQSGTSASLAISGLRSEDEADYYCAAWDDSLSGPV |
| | | | FGGGTQLTVL |
| 92 | 1467 | 1467 | SASSSNIGDNYFY |
| 92 | 1468 | 1468 | TCTGCAAGCAGCTCCAACATCGGAGATAATTATTTCTAC |
| 92 | 1469 | 1469 | GSDQRSS |
| 92 | 1470 | 1470 | GGTAGTGATCAACGGTCCTCA |
| 92 | 1471 | 1471 | AAWDDSLSGPV |
| 92 | 1472 | 1472 | GCAGCTTGGGATGACAGCCTGAGTGGTCCGGTG |
| 93 | 1473 | 1473 | CAGGTCCAGCTGGTGCAGTCTGGGGCTGAGGTGAAGAAGCCTGGGTC |
| | | | CTCGGTGATAATCTCCTGCAAGGCATCTGGAGGCACCTTCAGAAACT |
| | | | ACGGTTTCACCTGGGTGCGACAGGCCCCTGGACAAGGGCTTGAGTGG |
| | | | TTGGGAGGGATCATCCCTATGTTTGAGACAGTCAGATATGCACAGAA |
| | | | GTTCCAGGGAAGAGTCACAATCACCGCGGACGAAAACACCAACACA |
| | | | GCCTTCCTGGCGGTGAGCAGCCTGCGATCTGAAGACACGGGCGTCTA |
| | | | TTTTTGTGCGCGAGACCTCCAGACGGGGATTATGAGCAGCGTGAGGT |
| | | | CGGAATATAGGGGCTTTATGGACCCCTGGGGCCAGGGAACCCTGGTC |
| | | | ACCGTCTCCTCA |
| 93 | 1474 | 1474 | QVQLVQSGAEVKKPGSSVIISCKASGGTFRNYGFTWVRQAPGQGLEWLG |
| | | | GIIPMFETVRYAQKFQGRVTITADENTNTAFLAVSSLRSEDTGVYFCARD |
| | | | LQTGIMSSVRSEYRGFMDPWGQGTLVTVSS |
| 93 | 1475 | 1475 | GTFRNYGFT |
| 93 | 1476 | 1476 | GGCACCTTCAGAAACTACGGTTTCACC |
| 93 | 1477 | 1477 | GIIPMFETVRYAQKFQG |
| 93 | 1478 | 1478 | GGGATCATCCCTATGTTTGAGACAGTCAGATATGCACAGAAGTTCCA |
| | | | GGGA |
| 93 | 1479 | 1479 | ARDLQTGIMSSVRSEYRGFMDP |
| 93 | 1480 | 1480 | GCGCGAGACCTCCAGACGGGGATTATGAGCAGCGTGAGGTCGGAATA |
| | | | TAGGGGCTTTATGGACCCC |
| 93 | 1481 | 1481 | CAGTCTGTGCTGACGCAGCCGCCCTCGGTGTCTGGAGCCCCCCGGCA |
| | | | GAGGGTCACCATCTCCTGTTCTGGAAGCAGCTCCAACATCGGAACTA |
| | | | ATGCTGTAAACTGGTACCAACAGCTCCCAGGAAAGTCTCCCAAAGTC |
| | | | CTCATCTACTATGATGAGCTGGTGCCCTCAGGGGTCTCTGACCGATTC |
| | | | TCTGGCTCCAGGTCTGGCACCTCAGCCTCCCTGGCCATAAGTGGACTC |
| | | | CGGTCTGAGGATGAGGCTTACTATTACTGTGCAGCTTGGGATGACAG |
| | | | TCTGAATGGTTGGGTGTTCGGCGGAGGCACCCAGCTCACCGTCCTA |
| 93 | 1482 | 1482 | QSVLTQPPSVSGAPRQRVTISCSGSSSNIGTNAVNWYQQLPGKSPKVLIY |
| | | | YDELVPSGVSDRFSGSRSGTSASLAISGLRSEDEAYYYCAAWDDSLNGW |
| | | | VFGGGTQLTVL |
| 93 | 1483 | 1483 | SGSSSNIGTNAVN |
| 93 | 1484 | 1484 | TCTGGAAGCAGCTCCAACATCGGAACTAATGCTGTAAAC |
| 93 | 1485 | 1485 | YDELVPS |
| 93 | 1486 | 1486 | TATGATGAGCTGGTGCCCTCA |
| 93 | 1487 | 1487 | AAWDDSLNGWV |
| 93 | 1488 | 1488 | GCAGCTTGGGATGACAGTCTGAATGGTTGGGTG |
| 94 | 1489 | 1489 | GAGGTGCAGCTGGTGGAGTCGGGGGGAGGCGTGGTCCAGCCTGGGA |
| | | | GGTCCCTGAGACTCTCCTGTGCAGTCTCTGGATTCACGTTCAGTAACT |
| | | | TTGGGATGCACTGGGTCCGCCAGGCTCCAGGCAAGGGGCTGGAGTGG |
| | | | GTGGCAGCTATTTCATACGATGGAAGAAAAAGATTCCAGGCAGACTC |
| | | | CGTGAAGGGCCGATTCACCATCTCCAGAGACAACTTGAAGAACACGC |
| | | | TGAATCTCCAAATGAACAGCCTGAAAACTGAGGACACGGCTGTGTAT |
| | | | TACTGTGCGAAATCGTCTAGACTTTTGGACTGGTTATACAATATGGAC |
| | | | TTCTGGGGCCAAGGGACCACGGTCACCGTCTCCTCA |
| 94 | 1490 | 1490 | EVQLVESGGGVVQPGRSLRLSCAVSGFTFSNFGMHWVRQAPGKGLEWV |
| | | | AAISYDGRKRFQADSVKGRFTISRDNLKNTLNLQMNSLKTEDTAVYYCA |
| | | | KSSRLLDWLYNMDFWGQGTTVTVSS |
| 94 | 1491 | 1491 | FTFSNFGMH |
| 94 | 1492 | 1492 | TTCACGTTCAGTAACTTTGGGATGCAC |
| 94 | 1493 | 1493 | AISYDGRKRFQADSVKG |
| 94 | 1494 | 1494 | GCTATTTCATACGATGGAAGAAAAAGATTCCAGGCAGACTCCGTGAA |
| | | | GGGC |
| 94 | 1495 | 1495 | AKSSRLLDWLYNMDF |
| 94 | 1496 | 1496 | GCGAAATCGTCTAGACTTTTGGACTGGTTATACAATATGGACTTC |
| 94 | 1497 | 1497 | TCCTATGTGCTGACTCAGCCACCCTCAGTGTCAGTGGCCCCAGGAAA |
| | | | GACGGCCAGGATTACCTGTGGGGGAAACATCCTTGGGAGTTCAAGTG |
| | | | TCCACTGGTTCCAGCAGAAGGCAGGCCAGGCCCCTGTCCTGGTCATCT |
| | | | ATTATGATAGCGACCGGCCCTCAGGGATCCCTGAGCGATTCTCTGGCT |
| | | | CCCATTCTGGGGACACGGCCACCCTGACCATCAGCAGGGTCGAAGTC |
| | | | GGGGATGAGGCCGACTATTACTGTCAGGTGTGGGATAATAGTAATTC |
| | | | CCAGGGGGTCTTCGGCGGAGGCACCCAGCTGACCGTCCTC |
| 94 | 1498 | 1498 | SYVLTQPPSVSVAPGKTARITCGGNILGSSSVHWFQQKAGQAPVLVIYYD |
| | | | SDRPSGIPERFSGSHSGDTATLTISRVEVGDEADYYCQVWDNSNSQGVFG |
| | | | GGTQLTVL |
| 94 | 1499 | 1499 | GGNILGSSSVH |
| 94 | 1500 | 1500 | GGGGGAAACATCCTTGGGAGTTCAAGTGTCCAC |
| 94 | 1501 | 1501 | YDSDRPS |
| 94 | 1502 | 1502 | TATGATAGCGACCGGCCCTCA |
| 94 | 1503 | 1503 | QVWDNSNSQGV |
| 94 | 1504 | 1504 | CAGGTGTGGGATAATAGTAATTCCCAGGGGGTC |
| 95 | 1505 | 1505 | CAGGTGCAGCTACAGCAGTGGGGCCCAGGACTGGTGAAGCCGTCACA |
| | | | GACCCTGTCCCTCACCTGCAGTGTCTCTGGTGCCTCAGTCAAAATAGG |
| | | | TTCTAATTTCTGGACGTGGATCCGCCAGCGCCCAGGGAAGGGCCTGG |
| | | | AGTGGATTGGGGCCATCCATGACACTGGCACCACCTACTACAACCCG |
| | | | TCCCTTGAGCCTCAAGTAATCATTTCAACTGACACGTCTCAGAACCAA |
| | | | TTCTCCCTGAGGCTGACCTCTGTGACTGCCGCGGACACGGCCGTTTAC |
| | | | TACTGTGCGAGGGGGCGTGGATACACCTATGGATGGCGTTACTTTGA |
| | | | CTACTGGGGCCAGGGAACCCTGGTCACCGTCTCCTCA |
| 95 | 1506 | 1506 | QVQLQQWGPGLVKPSQTLSLTCSVSGASVKIGSNFWTWIRQRPGKGLE |
| | | | WIGAIHDTGTTYYNPSLEPQVIISTDTSQNQFSLRLTSVTAADTAVYYCA |
| | | | RGRGYTYGWRYFDYWGQGTLVTVSS |
| 95 | 1507 | 1507 | ASVKIGSNFWT |
| 95 | 1508 | 1508 | GCCTCAGTCAAAATAGGTTCTAATTTCTGGACG |
| 95 | 1509 | 1509 | AIHDTGTTYYNPSLEP |
| 95 | 1510 | 1510 | GCCATCCATGACACTGGCACCACCTACTACAACCCGTCCCTTGAGCCT |
| 95 | 1511 | 1511 | ARGRGYTYGWRYFDY |
| 95 | 1512 | 1512 | GCGAGGGGGCGTGGATACACCTATGGATGGCGTTACTTTGACTAC |
| 95 | 1513 | 1513 | TCCTATGTGCTGACTCAGCCACCCTCGGTGTCAGTGTCCCCAGGACAG |
| | | | ACGGCCAGGATCACCTGCTCTGGAGATGCATTGCCAAAGCAATATGC |
| | | | CTTTTGGTATCAGCACAAGGCAGGACAGGCCCCTGTGTTGGTCATAA |
| | | | AAAAAGACACTGAGAGGCCCTCAGGGATCCCTGAGCGATTCTCTGGC |
| | | | TCCATCTCAGGGACAACAGCCACTTTGATCATCAGTGGAGTCCAGGC |
| | | | AGAAGACGAGGCTGACTATTACTGTCAATCTTCAGACAGTAGTGGTA |
| | | | ATGTTGTCTTATTCGGCGGAGGCACCCAGCTGACCGTCCTC |
| 95 | 1514 | 1514 | SYVLTQPPSVSVSPGQTARITCSGDALPKQYAFWYQHKAGQAPVLVIKK |
| | | | DTERPSGIPERFSGSISGTTATLIISGVQAEDEADYYCQSSDSSGNVVLFGG |
| | | | GTQLTVL |
| 95 | 1515 | 1515 | SGDALPKQYAF |
| 95 | 1516 | 1516 | TCTGGAGATGCATTGCCAAAGCAATATGCCTTT |
| 95 | 1517 | 1517 | KDTERPS |
| 95 | 1518 | 1518 | AAAGACACTGAGAGGCCCTCA |
| 95 | 1519 | 1519 | QSSDSSGNVVL |
| 95 | 1520 | 1520 | CAATCTTCAGACAGTAGTGGTAATGTTGTCTTA |
| 96 | 1521 | 1521 | CAGGTGCAGCTGGTGCAATCTGGGGGAGGCGTGGTCCAGCCTGGGAG |
| | | | GTCCCTGAGACTCTCCTGTGCAGCGTCTGGATTCAGCTTCAGTAGTTA |
| | | | TGGCATGCACTGGGTCCGCCAGGCTCCAGGCAAGGGGCTGGAGTGGG |
| | | | TGGCAGCTATATTTTATCATGAAATTAAGGACTATTATGCAGACTCCG |
| | | | TGAACGGCCGATTCAGCATCTCCAGAGACAATTCCAAGAACACCCTG |
| | | | TATCTGGAAATGTACAGCCTGAAGGTCGAGGACACGGCTGTGTATTA |
| | | | TTGTGCGAGAGATAGTGGGACCCTCACAGGACTCCCGCATGATGCCT |
| | | | TTGATATCTGGGGCCAAGGGACCACGGTCACCGTCTCCTCA |
| 96 | 1522 | 1522 | QVQLVQSGGGVVQPGRSLRLSCAASGFSFSSYGMHWVRQAPGKGLEW |
| | | | VAAIFYHEIKDYYADSVNGRFSISRDNSKNTLYLEMYSLKVEDTAVYYC |
| | | | ARDSGTLTGLPHDAFDIWGQGTTVTVSS |
| 96 | 1523 | 1523 | FSFSSYGMH |
| 96 | 1524 | 1524 | TTCAGCTTCAGTAGTTATGGCATGCAC |
| 96 | 1525 | 1525 | AIFYHEIKDYYADSVNG |
| 96 | 1526 | 1526 | GCTATATTTTATCATGAAATTAAGGACTATTATGCAGACTCCGTGAAC |
| | | | GGC |
| 96 | 1527 | 1527 | ARDSGTLTGLPHDAFDI |
| 96 | 1528 | 1528 | GCGAGAGATAGTGGGACCCTCACAGGACTCCCGCATGATGCCTTTGA |
| | | | TATC |
| 96 | 1529 | 1529 | GACATCCAGATGACCCAGTCTCCTTCCACCCTGAGTGCATCTTTAGGA |
| | | | GGCAGAGTCACCATCACTTGCCGGGCCAGTCAGAGTGTTACTAACAG |
| | | | GTTGGCCTGGTATCAACACAAACCAGGGAAAGCCCCTAACCTCCTGA |
| | | | TCTATAAGGCGTCTACTTTAGAAATCGGGGTCCCATCAAGGTTCAGCG |
| | | | GCAGTGGATCTGGGACAGAGTTCACTCTCACCATCAGCAGCCTGCAG |
| | | | CCTGATGATTTTGCGACTTATTACTGCCAACAGTATAGTAGTTATTCG |
| | | | TGGACGTTCGGCCAAGGGACCAAGGTGGAAATCAAA |
| 96 | 1530 | 1530 | DIQMTQSPSTLSASLGGRVTITCRASQSVTNRLAWYQHKPGKAPNLLIYK |
| | | | ASTLEIGVPSRFSGSGSGTEFTLTISSLQPDDFATYYCQQYSSYSWTFGQG |
| | | | TKVEIK |
| 96 | 1531 | 1531 | RASQSVTNRLA |
| 96 | 1532 | 1532 | CGGGCCAGTCAGAGTGTTACTAACAGGTTGGCC |
| 96 | 1533 | 1533 | KASTLEI |
| 96 | 1534 | 1534 | AAGGCGTCTACTTTAGAAATC |
| 96 | 1535 | 1535 | QQYSSYSWT |
| 96 | 1536 | 1536 | CAACAGTATAGTAGTTATTCGTGGACG |
| 97 | 1537 | 1537 | GAGGTGCAGCTGGTGGAGTCTGGGGGAGGCTTGGTAAAGCCTGGGGG |
| | | | GTCCCTAAGACTCTCATGTGCAGCCTCTGGATTCATCTTCCGCAACGC |
| | | | CTGGATGAGCTGGGTCCGCCAGGCTCCAGGGAAGGGGCTGGAGTGGG |
| | | | TTGGCCGGATTAAAAGGACAAGTGAAGGTGGGTCAGTCGACTACGCG |
| | | | ACACCCGTGCAAGGCAGATTCTCCATCTCAAGAGATGATTCTAGAAA |
| | | | GACGCTGTATCTGCAAATGAACAGCCTGGAAACCGACGACACAGCCG |
| | | | TGTATTACTGTTCCACAGGCCCACCCTATTCTTACTTTGATAGTAGTG |
| | | | GTTATTCGGTCGTGGACTACTGGGGCCTGGGAACCCTGGTCACCGTCT |
| | | | CCTCA |
| 97 | 1538 | 1538 | EVQLVESGGGLVKPGGSLRLSCAASGFIFRNAWMSWVRQAPGKGLEWV |
| | | | GRIKRTSEGGSVDYATPVQGRFSISRDDSRKTLYLQMNSLETDDTAVYY |
| | | | CSTGPPYSYFDSSGYSVVDYWGLGTLVTVSS |
| 97 | 1539 | 1539 | FIFRNAWMS |
| 97 | 1540 | 1540 | TTCATCTTCCGCAACGCCTGGATGAGC |
| 97 | 1541 | 1541 | RIKRTSEGGSVDYATPVQG |
| 97 | 1542 | 1542 | CGGATTAAAAGGACAAGTGAAGGTGGGTCAGTCGACTACGCGACACC |
| | | | CGTGCAAGGC |
| 97 | 1543 | 1543 | STGPPYSYFDSSGYSVVDY |
| 97 | 1544 | 1544 | TCCACAGGCCCACCCTATTCTTACTTTGATAGTAGTGGTTATTCGGTC |
| | | | GTGGACTAC |
| 97 | 1545 | 1545 | CAGCCAGTGCTGACTCAGCCCCCCTCAGCGTCTGGGACCCCCGGGCA |
| | | | GAGGGTCACCATCTCTTGTTCTGCAAGCAGCTCCAACATCGGAGATA |
| | | | ATTATTTCTACTGGTACCAACAACTCCCAGGAAAGGCCCCCACACTCC |
| | | | TCATGTATGGTAGTGATCAACGGTCCTCAGGGGTCCCTGACCGATTCT |
| | | | CTGGCTCCCAGTCTGGCACCTCTGCCTCCCTGGCCATCAGTGGGCTCC |
| | | | GGTCCGAGGATGAAGCTGATTATTATTGTGCAGCTTGGGATGACAGC |
| | | | CTGAGTGGTCCGGTGTTCGGCGGAGGGACCAAGCTCACCGTCCTA |
| 97 | 1546 | 1546 | QPVLTQPPSASGTPGQRVTISCSASSSNIGDNYFYWYQQLPGKAPTLLMY |
| | | | GSDQRSSGVPDRFSGSQSGTSASLAISGLRSEDEADYYCAAWDDSLSGPV |
| | | | FGGGTKLTVL |
| 97 | 1547 | 1547 | SASSSNIGDNYFY |
| 97 | 1548 | 1548 | TCTGCAAGCAGCTCCAACATCGGAGATAATTATTTCTAC |
| 97 | 1549 | 1549 | GSDQRSS |
| 97 | 1550 | 1550 | GGTAGTGATCAACGGTCCTCA |
| 97 | 1551 | 1551 | AAWDDSLSGPV |
| 97 | 1552 | 1552 | GCAGCTTGGGATGACAGCCTGAGTGGTCCGGTG |
| 98 | 1553 | 1553 | GAGGTGCAGCTGGTGGAGTCGGGGGGAGGCGTGGTCCAGCCTGGGA |
| | | | GGTCCCTGAGACTCTCCTGTGCAGTCTCTGGATTCACATTCAGTAACT |
| | | | TTGGGATGCACTGGGTCCGCCAGGCTCCAGGCAAGGGGCTGGAGTGG |
| | | | GTGGCAGCTATTTCATACGATGGAAGAAAAACATTCCAGGCAGACTC |
| | | | CGTGAAGGGCCGATTCATCATCTCCAGAGACAACTTGAAGAACACGT |
| | | | TGAATCTCCAAATGAACAGCCTGAAAACTGAGGACACGGCTGTGTAT |
| | | | TACTGTGCGAAATCGTCTAGATTTTTGGACTGGTTATACAATATGGAC |
| | | | TTCTGGGGCCAAGGGACCACGGTCACCGTCTCCTCA |
| 98 | 1554 | 1554 | EVQLVESGGGVVQPGRSLRLSCAVSGFTFSNFGMHWVRQAPGKGLEWV |
| | | | AAISYDGRKTFQADSVKGRFIISRDNLKNTLNLQMNSLKTEDTAVYYCA |
| | | | KSSRFLDWLYNMDFWGQGTTVTVSS |
| 98 | 1555 | 1555 | FTFSNFGMH |
| 98 | 1556 | 1556 | TTCACATTCAGTAACTTTGGGATGCAC |
| 98 | 1557 | 1557 | AISYDGRKTFQADSVKG |
| 98 | 1558 | 1558 | GCTATTTCATACGATGGAAGAAAAACATTCCAGGCAGACTCCGTGAA |
| | | | GGGC |
| 98 | 1559 | 1559 | AKSSRFLDWLYNMDF |
| 98 | 1560 | 1560 | GCGAAATCGTCTAGATTTTTGGACTGGTTATACAATATGGACTTC |
| 98 | 1561 | 1561 | TCCTATGAGCTGACACAGCCACCCTCAGTGTCAGAGGCCCCAGGAAA |
| | | | GACGGCCACGATTACCTGTGGGGGAATCATCCTTGGGACTTCAAGTG |
| | | | TCCACTGGTTCCAGCAGAAGTCAGGCCAGGCCCCTGTCCTGGTCATCT |
| | | | ATTATGATAGCGACCGGCCCTCAGGGATCCCTGAGCGATTCTCTGGCT |
| | | | CCCATTCTGGGGACACGGCCACCCTGACCATCAGCAGGGTCGAAGTC |
| | | | GGGGATGAGGCCGACTATTACTGTCAGGTGTGGGATAATAGTCATTC |
| | | | CCAGGGGGTCTTCGGCGGAGGCACCCAGCTGACCGTCCTC |
| 98 | 1562 | 1562 | SYELTQPPSVSEAPGKTATITCGGIILGTSSVHWFQQKSGQAPVLVIYYDS |
| | | | DRPSGIPERFSGSHSGDTATLTISRVEVGDEADYYCQVWDNSHSQGVFG |
| | | | GGTQLTVL |
| 98 | 1563 | 1563 | GGIILGTSSVH |
| 98 | 1564 | 1564 | GGGGGAATCATCCTTGGGACTTCAAGTGTCCAC |
| 98 | 1565 | 1565 | YDSDRPS |
| 98 | 1566 | 1566 | TATGATAGCGACCGGCCCTCA |
| 98 | 1567 | 1567 | QVWDNSHSQGV |
| 98 | 1568 | 1568 | CAGGTGTGGGATAATAGTCATTCCCAGGGGGTC |
| 99 | 1569 | 1569 | CAGGTGCAGCTGGTGGAGTCTGGGGGAGGCGTGGTCCAGCCTGGGAG |
| | | | GTCCCTGAGACTCTCCTGTGCAGCGTCTGGATTCGCCTTCCGTGTCTA |
| | | | TGACATCCACTGGGTCCGCCAGGCTCCAGGCAAGGGGCTGGAGTGGG |
| | | | TGGCAGTTGCCTGGTCTGATGGACGTGATGAATTCTATGCAGACTCCG |
| | | | TGAAGGGCCGAATCACCATCTCCAGAGACAATTCAAAGAACACTGTA |
| | | | TATCTGCAGATGAGCAGCCTGAGAGTCGCGGATACGGCTGTGTATTA |
| | | | CTGTGCGAGAGATAGTGGGACCCTAACAGGGCTCCCTCATGATGCTT |
| | | | TTGATGTCTGGGGCCAGGGGACCACGGTCACCGTCTCCTCA |
| 99 | 1570 | 1570 | QVQLVESGGGVVQPGRSLRLSCAASGFAFRVYDIHWVRQAPGKGLEWV |
| | | | AVAWSDGRDEFYADSVKGRITISRDNSKNTVYLQMSSLRVADTAVYYC |
| | | | ARDSGTLTGLPHDAFDVWGQGTTVTVSS |
| 99 | 1571 | 1571 | FAFRVYDIH |
| 99 | 1572 | 1572 | TTCGCCTTCCGTGTCTATGACATCCAC |
| 99 | 1573 | 1573 | VAWSDGRDEFYADSVKG |
| 99 | 1574 | 1574 | GTTGCCTGGTCTGATGGACGTGATGAATTCTATGCAGACTCCGTGAAG |
| | | | GGC |
| 99 | 1575 | 1575 | ARDSGTLTGLPHDAFDV |
| 99 | 1576 | 1576 | GCGAGAGATAGTGGGACCCTAACAGGGCTCCCTCATGATGCTTTTGA |
| | | | TGTC |
| 99 | 1577 | 1577 | GACATCCAGTTGACCCAGTCTCCTTCCACCCTGTCTGCATCTGTAGGA |
| | | | GACAGAGTCACCATCACTTGCCGGGCCAGTCAGAGTATTACCACCAG |
| | | | GTTGGCCTGGTATCAGCAGAAATTAGGGAAAGCCCCTAAGCTCCTGG |
| | | | TCTATAAGGCGTCAACTTTAGAAATTGGGGTCCCCTCAAGGTTCAGCG |
| | | | GCAGGGGATCTGGGACAGAATTCACTCTCACCATCAGCAGCCTGCAG |
| | | | CCTGATGATTTTGCAACTTATTACTGCCATCACTACAATAGTTATTCG |
| | | | TGGACGTTCGGCCAAGGGACCAAAGTGGATATCAAA |
| 99 | 1578 | 1578 | DIQLTQSPSTLSASVGDRVTITCRASQSITTRLAWYQQKLGKAPKLLVYK |
| | | | ASTLEIGVPSRFSGRGSGTEFTLTISSLQPDDFATYYCHHYNSYSWTFGQG |
| | | | TKVDIK |
| 99 | 1579 | 1579 | RASQSITTRLA |
| 99 | 1580 | 1580 | CGGGCCAGTCAGAGTATTACCACCAGGTTGGCC |
| 99 | 1581 | 1581 | KASTLEI |
| 99 | 1582 | 1582 | AAGGCGTCAACTTTAGAAATT |
| 99 | 1583 | 1583 | HHYNSYSWT |
| 99 | 1584 | 1584 | CATCACTACAATAGTTATTCGTGGACG |
| 100 | 1585 | 1585 | CAGGTGCAGCTGGTGGAGTCTGGGGGAGGCGTGGTCCAGCCTGGGAG |
| | | | GTCCCTGAGACTCTCCTGTGCTGCCTCTGGATTCACTTTCACTGACTAT |
| | | | GCTATGCACTGGGTCCGCCAGGCTCCAGGCAAGGGACTACAGTGGGT |
| | | | GGCACTTATATCATATAACGGACGTATACAATATTACGCAGACTCCGT |
| | | | GAAGGGCCGATTCACCATCTCCAGAGACGATTCCAAGAACACGCTGT |
| | | | ATCTGCAGATGAACAGCCTGAGAGCTGGGGACACGGCTGTCTATTAC |
| | | | TGTGCGAGAGATGGGGATCTTGTGGCTGTCCCAGCTGCTATCGGCTTC |
| | | | GACTCCTGGGGCCAGGGAACCCTGGTCACCGTCTCCTCA |
| 100 | 1586 | 1586 | QVQLVESGGGVVQPGRSLRLSCAASGFTFTDYAMHWVRQAPGKGLQW |
| | | | VALISYNGRIQYYADSVKGRFTISRDDSKNTLYLQMNSLRAGDTAVYYC |
| | | | ARDGDLVAVPAAIGFDSWGQGTLVTVSS |
| 100 | 1587 | 1587 | FTFTDYAMH |
| 100 | 1588 | 1588 | TTCACTTTCACTGACTATGCTATGCAC |
| 100 | 1589 | 1589 | LISYNGRIQYYADSVKG |
| 100 | 1590 | 1590 | CTTATATCATATAACGGACGTATACAATATTACGCAGACTCCGTGAA |
| | | | GGGC |
| 100 | 1591 | 1591 | ARDGDLVAVPAAIGFDS |
| 100 | 1592 | 1592 | GCGAGAGATGGGGATCTTGTGGCTGTCCCAGCTGCTATCGGCTTCGA |
| | | | CTCC |
| 100 | 1593 | 1593 | GACATCCAGGTGACCCAGTCTCCAGACTCCCTGGCTGTGTCTCTGGGC |
| | | | GAGAGGGCCACCATCAACTGCAAGTCCAGCCAGAGTGTTTTATACAC |
| | | | CTCCAACAACAAGAACTACTTAGCTTGGTACCAGCAGAAATCGAGAC |
| | | | AGCCTCCTAAGCTGCTCATTTACTGGGCATCTACCCGGGAATCCGGGG |
| | | | TCCCTGAGCGATTCAGTGGCAGCGGGTCTGGGACAGATTTCACTCTCA |
| | | | CCATCAGCAGCCTGCAGGCTGAAGATGTGGCAGTTTATTACTGTCAG |
| | | | CAATATTCTAGTCCTCCGTACACTTTTGGCCAGGGGACCAAGGTGGA |
| | | | GATTAAA |
| 100 | 1594 | 1594 | DIQVTQSPDSLAVSLGERATINCKSSQSVLYTSNNKNYLAWYQQKSRQP |
| | | | PKLLIYWASTRESGVPERFSGSGSGTDFTLTISSLQAEDVAVYYCQQYSSP |
| | | | PYTFGQGTKVEIK |
| 100 | 1595 | 1595 | KSSQSVLYTSNNKNYLA |
| 100 | 1596 | 1596 | AAGTCCAGCCAGAGTGTTTTATACACCTCCAACAACAAGAACTACTT |
| | | | AGCT |
| 100 | 1597 | 1597 | WASTRES |
| 100 | 1598 | 1598 | TGGGCATCTACCCGGGAATCC |
| 100 | 1599 | 1599 | QQYSSPPYT |
| 100 | 1600 | 1600 | CAGCAATATTCTAGTCCTCCGTACACT |
| 101 | 1601 | 1601 | GAGGTGCAGCTGGTGGAGTCTGGGGGAGGCCTGGTCAGGCCGGGGG |
| | | | GGTCCCTGAGACTCTCCTGCGCAGCGTCTGGATTCGCCTTCAGTAGCT |
| | | | ATAGTTTACACTGGGTCCGCCAGGCTCCAGGGAGGGGACTGGAGTGG |
| | | | GTCGCATCGATCAGTGCAGGTAGCAGTTTCACAGATTACGCGGCCTC |
| | | | AGTGAGGGGCCGATTCACTATCTCCAGAAACATCGCCAACTCACTGT |
| | | | ATCTGCAAATGAACAGGCTGAGAGCCGAGGACACGGCTGTCTATTAC |
| | | | TGTGCGAGAGTTATCGGAGACGGGACGATTCTTGGAGTGGTTTTTGAC |
| | | | TACTGGGGCCCGGGAACCCTGGTCACCGTCTCCTCA |
| 101 | 1602 | 1602 | EVQLVESGGGLVRPGGSLRLSCAASGFAFSSYSLHWVRQAPGRGLEWV |
| | | | ASISAGSSFTDYAASVRGRFTISRNIANSLYLQMNRLRAEDTAVYYCARV |
| | | | IGDGTILGVVFDYWGPGTLVTVSS |
| 101 | 1603 | 1603 | FAFSSYSLH |
| 101 | 1604 | 1604 | TTCGCCTTCAGTAGCTATAGTTTACAC |
| 101 | 1605 | 1605 | SISAGSSFTDYAASVRG |
| 101 | 1606 | 1606 | TCGATCAGTGCAGGTAGCAGTTTCACAGATTACGCGGCCTCAGTGAG |
| | | | GGGC |
| 101 | 1607 | 1607 | ARVIGDGTILGVVFDY |
| 101 | 1608 | 1608 | GCGAGAGTTATCGGAGACGGGACGATTCTTGGAGTGGTTTTTGACTAC |
| 101 | 1609 | 1609 | CAGTCTGTCCTGACGCAGCCGCCCTCAGTGTCTGGGGCCCCAGGGCA |
| | | | GAGGGTCACCATCTCCTGCACTGGGGGCAGGTCCAACATCGGGGCCG |
| | | | GTTATGATGTACACTGGTACCAGCAACTTCCAGGGACAGCCCCCAAA |
| | | | CTCCTCATCTATGGTAACATCAATCGGCCCTCAGGGGTCCCTGACCGA |
| | | | TTCTCTGGCTCCAAGTCTGGCACCTCAGCCTCCCTGGCCATCACTGGG |
| | | | CTCCTGGCTGAGGATGAGGCTGATTATTACTGCCAGTCCTATGACAGC |
| | | | AGCCTGAGTGTGATTTTCGGCGGAGGGACCAAGCTCACCGTCCTA |
| 101 | 1610 | 1610 | QSVLTQPPSVSGAPGQRVTISCTGGRSNIGAGYDVHWYQQLPGTAPKLLI |
| | | | YGNINRPSGVPDRFSGSKSGTSASLAITGLLAEDEADYYCQSYDSSLSVIF |
| | | | GGGTKLTVL |
| 101 | 1611 | 1611 | TGGRSNIGAGYDVH |
| 101 | 1612 | 1612 | ACTGGGGGCAGGTCCAACATCGGGGCCGGTTATGATGTACAC |
| 101 | 1613 | 1613 | GNINRPS |
| 101 | 1614 | 1614 | GGTAACATCAATCGGCCCTCA |
| 101 | 1615 | 1615 | QSYDSSLSVI |
| 101 | 1616 | 1616 | CAGTCCTATGACAGCAGCCTGAGTGTGATT |
| 102 | 1617 | 1617 | CAGGTCCAGCTGGTGCAGTCTGGAGCAGAGGTGAAAAAGCCCGGGG |
| | | | AGTCTCTGAAGATCTCCTGTAAGGGTTCTGGATACGTCTTTAGTAGTT |
| | | | ACTGGGTCGCCTGGGTGCGCCAGATGCCCGGGAAAGGCCTGGAGTGG |
| | | | ATGGGGATCATCTATCCTCATGACTCTGATACCAGATACAGCCCGGCC |
| | | | TTCCAAGGCCAGGTCACCATTTCAGCCGATAAGTCCATCAACACCGC |
| | | | CTACCTGCAGTGGAGCAGCCTGAAGGCCTCGGACACCGCCATGTATT |
| | | | ACTGCACCATTATACTAATACCAGCTCCTATACGGGCCCCTGATGGTT |
| | | | TTGATATCTGGGGCCAAGGGACCACGGTCACCGTCTCCTCA |
| 102 | 1618 | 1618 | QVQLVQSGAEVKKPGESLKISCKGSGYVFSSYWVAWVRQMPGKGLEW |
| | | | MGIIYPHDSDTRYSPAFQGQVTISADKSINTAYLQWSSLKASDTAMYYCT |
| | | | IILIPAPIRAPDGFDIWGQGTTVTVSS |
| 102 | 1619 | 1619 | YVFSSYWVA |
| 102 | 1620 | 1620 | TACGTCTTTAGTAGTTACTGGGTCGCC |
| 102 | 1621 | 1621 | IIYPHDSDTRYSPAFQG |
| 102 | 1622 | 1622 | ATCATCTATCCTCATGACTCTGATACCAGATACAGCCCGGCCTTCCAA |
| | | | GGC |
| 102 | 1623 | 1623 | TIILIPAPIRAPDGFDI |
| 102 | 1624 | 1624 | ACCATTATACTAATACCAGCTCCTATACGGGCCCCTGATGGTTTTGAT |
| | | | ATC |
| 102 | 1625 | 1625 | AATTTTATGCTGACTCAGCCCCACTCTGTGTCGGAGTCTCCGGGGAAG |
| | | | ACGGTAACCATCTCCTGCACCGGCAGCGGTGGCACCATTGCCAGCAA |
| | | | CTATGTGCAGTGGTACCAGCAGCGCCCGGGCAGTGTCCCCACCACTG |
| | | | TGATCTATGAGAATAACGAAAGACCCTCTGGGGTCCCTGATCGGTTCT |
| | | | CTGGCTCCATCGACAGGTCCTCCAACTCTGCCTCCCTCACCATCTCTG |
| | | | GACTGAAGACTGAGGACGAGGCTGACTACTACTGTCAGTCTTATGAT |
| | | | AGCAGCTATCATGTGGTATTCGGCGGAGGGACCAAGGTCACCGTCCTA |
| 102 | 1626 | 1626 | NFMLTQPHSVSESPGKTVTISCTGSGGTIASNYVQWYQQRPGSVPTTVIY |
| | | | ENNERPSGVPDRFSGSIDRSSNSASLTISGLKTEDEADYYCQSYDSSYHVV |
| | | | FGGGTKVTVL |
| 102 | 1627 | 1627 | TGSGGTIASNYVQ |
| 102 | 1628 | 1628 | ACCGGCAGCGGTGGCACCATTGCCAGCAACTATGTGCAG |
| 102 | 1629 | 1629 | ENNERPS |
| 102 | 1630 | 1630 | GAGAATAACGAAAGACCCTCT |
| 102 | 1631 | 1631 | QSYDSSYHVV |
| 102 | 1632 | 1632 | CAGTCTTATGATAGCAGCTATCATGTGGTA |
| 103 | 1633 | 1633 | CAGGTGCAGCTGGTGCAGTCTGGGGCTGAGGTGAAGAAGCCTGGGTC |
| | | | CTCGGTGAAGGTCTCCTGCAAGGCCTCTGGAGACACGTTCAGCAGCT |
| | | | ATGCTATCAGCTGGGTGCGACAGGCCCCTGGACAAGGACTTGAGTGG |
| | | | ATGGGAGGGGTCCTCCCTATGTTAGGGACAGCAAACTACGCACAGAG |
| | | | GTTCCGGGGCAGAGTCACACTTACCGCGGACGGATCCACGAACACAG |
| | | | CCTACATGGAGATGAGCAGCCTGAGACTTGACGACACGGCCGTGTAT |
| | | | TACTGTGCGAGAGTGGCCGGTCTGGGAAATAGCTACGGTCGATACCC |
| | | | TGACCTCTGGGGCCAGGGAACCCTGGTCACCGTCTCCTCA |
| 103 | 1634 | 1634 | QVQLVQSGAEVKKPGSSVKVSCKASGDTFSSYAISWVRQAPGQGLEWM |
| | | | GGVLPMLGTANYAQRFRGRVTLTADGSTNTAYMEMSSLRLDDTAVYY |
| | | | CARVAGLGNSYGRYPDLWGQGTLVTVSS |
| 103 | 1635 | 1635 | DTFSSYAIS |
| 103 | 1636 | 1636 | GACACGTTCAGCAGCTATGCTATCAGC |
| 103 | 1637 | 1637 | GVLPMLGTANYAQRFRG |
| 103 | 1638 | 1638 | GGGGTCCTCCCTATGTTAGGGACAGCAAACTACGCACAGAGGTTCCG |
| | | | GGGC |
| 103 | 1639 | 1639 | ARVAGLGNSYGRYPDL |
| 103 | 1640 | 1640 | GCGAGAGTGGCCGGTCTGGGAAATAGCTACGGTCGATACCCTGACCTC |
| 103 | 1641 | 1641 | GATATTGTGATGACCCAGTCTCCATCTTCTCTGTCTGCATCTGTTGGA |
| | | | GACAGAGTCACCATCACTTGTCGGGCGAGTCAGGGTATTAGCAGCTC |
| | | | GTTAGCCTGGTATCAGCAGAAACCAGGGAAAGCCCCTGAGCTCCTGA |
| | | | TCTATGCTGCATCCAGTTTGCACAGTGGGGTCCCATCGAGGTTCCGGG |
| | | | GCAGTGGATCTGGGACAGACTTCACTCTCACTATCAGCAGCGTGCAG |
| | | | CCTGAAGATTTTGCAACTTACTATTGTCAACAGGCAAACAGTTTCCCG |
| | | | TACACTTTTGGCCAGGGGACCAAGCTGGAGATCAAA |
| 103 | 1642 | 1642 | DIVMTQSPSSLSASVGDRVTITCRASQGISSSLAWYQQKPGKAPELLIYAA |
| | | | SSLHSGVPSRFRGSGSGTDFTLTISSVQPEDFATYYCQQANSFPYTFGQGT |
| | | | KLEIK |
| 103 | 1643 | 1643 | RASQGISSSLA |
| 103 | 1644 | 1644 | CGGGCGAGTCAGGGTATTAGCAGCTCGTTAGCC |
| 103 | 1645 | 1645 | AASSLHS |
| 103 | 1646 | 1646 | GCTGCATCCAGTTTGCACAGT |
| 103 | 1647 | 1647 | QQANSFPYT |
| 103 | 1648 | 1648 | CAACAGGCAAACAGTTTCCCGTACACT |
| 104 | 1649 | 1649 | CAGGTCCAGCTTGTACAGTCTGGAGCAGAGGTGAAAAAGCCGGGGG |
| | | | AGTCTCTGAAGATCTCCTGTAAGGGTGCAGGATTCGGCTCTACCAACT |
| | | | CCTGGATCGGCTGGGTGCGCCAGATGCCCGGGAAAGGCCTGGAGTGG |
| | | | ATGGGGGTCATCTTTCCAGGTGACTCTGATACCAAATACAGCCCGAC |
| | | | CTTCCAAGGCCAGGTCACCATCTCAGTCGACAAGTCCATCAACACCG |
| | | | CCTACCTGCAGTGGAGCAGCCTGAAGGCCTCGGACACCGCCATCTAT |
| | | | TACTGTGCGAGAATGCTGGCTTCTGTTGGTTTGTCCAACTTTGACGCG |
| | | | TGGGGCCAGGGAACCCTGGTCACCGTCTCCTCA |
| 104 | 1650 | 1650 | QVQLVQSGAEVKKPGESLKISCKGAGFGSTNSWIGWVRQMPGKGLEW |
| | | | MGVIFPGDSDTKYSPTFQGQVTISVDKSINTAYLQWSSLKASDTAIYYCA |
| | | | RMLASVGLSNFDAWGQGTLVTVSS |
| 104 | 1651 | 1651 | FGSTNSWIG |
| 104 | 1652 | 1652 | TTCGGCTCTACCAACTCCTGGATCGGC |
| 104 | 1653 | 1653 | VIFPGDSDTKYSPTFQG |
| 104 | 1654 | 1654 | GTCATCTTTCCAGGTGACTCTGATACCAAATACAGCCCGACCTTCCAA |
| | | | GGC |
| 104 | 1655 | 1655 | ARMLASVGLSNFDA |
| 104 | 1656 | 1656 | GCGAGAATGCTGGCTTCTGTTGGTTTGTCCAACTTTGACGCG |
| 104 | 1657 | 1657 | CAGCCTGTGCTGACTCAGCCACCCTCAGTGTCACTGGCCCCAGGAAA |
| | | | GACGGCCACGATTACCTGTGGGGGAAACAACATTGGAGGTAAAAGTG |
| | | | TGCACTGGTACCAGCAGAAGCCAGGCCAGGCCCCTGTGCTGGTCATC |
| | | | GATTATGATAGCGACCGGCCCTCAGGGATCCCTGAGCGATTCTCTGG |
| | | | CTCCAACTCTGGGAACACGGCCACCCTGACCATCAACAGGGTCGAAG |
| | | | CCGGGGATGAGGCCGACTACTACTGTCAGGTGTGGGATAGTATTAGT |
| | | | GATCATGTGTTATTCGGTGGAGGGACCAAGCTGACCGTCCTA |
| 104 | 1658 | 1658 | QPVLTQPPSVSLAPGKTATITCGGNNIGGKSVHWYQQKPGQAPVLVIDY |
| | | | DSDRPSGIPERFSGSNSGNTATLTINRVEAGDEADYYCQVWDSISDHVLF |
| | | | GGGTKLTVL |
| 104 | 1659 | 1659 | GGNNIGGKSVH |
| 104 | 1660 | 1660 | GGGGGAAACAACATTGGAGGTAAAAGTGTGCAC |
| 104 | 1661 | 1661 | YDSDRPS |
| 104 | 1662 | 1662 | TATGATAGCGACCGGCCCTCA |
| 104 | 1663 | 1663 | QVWDSISDHVL |
| 104 | 1664 | 1664 | CAGGTGTGGGATAGTATTAGTGATCATGTGTTA |
| 105 | 1665 | 1665 | GAGGTGCAGCTGGTGGAGTCTGGGGGAGGCTTGGTTAAGCCTGGGGG |
| | | | GTCCCTTAGACTCTCTTGTGCAGCCTCTGGATTCACTTTCAGTAACGC |
| | | | CTGGATGAGCTGGGTCCGCCAGGCTCCAGGGAAGGGGCTGGAGTGGG |
| | | | TTGGCCGTGTTAAAAGCAAATCTAAAGGTGGGACAACACACTACGCT |
| | | | GAAGCCGTGAAGGGCAGATTCACCATTTCAAGAGATGATTCAAAAAA |
| | | | CACGCTGTACCTCCAAATGCAGAGCCTGAAAACCGAGGACACAGCCG |
| | | | TCTATTACTGTACCTCCCACGCGTATAATAGTGACTGGTTCGTGACGA |
| | | | CTGACTACTACTACTACATGGACGTCTGGGGCAAAGGGACCACGGTC |
| | | | ACCGTCTCCTCA |
| 105 | 1666 | 1666 | EVQLVESGGGLVKPGGSLRLSCAASGFTFSNAWMSWVRQAPGKGLEW |
| | | | VGRVKSKSKGGTTHYAEAVKGRFTISRDDSKNTLYLQMQSLKTEDTAV |
| | | | YYCTSHAYNSDWFVTTDYYYYMDVWGKGTTVTVSS |
| 105 | 1667 | 1667 | FTFSNAWMS |
| 105 | 1668 | 1668 | TTCACTTTCAGTAACGCCTGGATGAGC |
| 105 | 1669 | 1669 | RVKSKSKGGTTHYAEAVKG |
| 105 | 1670 | 1670 | CGTGTTAAAAGCAAATCTAAAGGTGGGACAACACACTACGCTGAAGC |
| | | | CGTGAAGGGC |
| 105 | 1671 | 1671 | TSHAYNSDWFVTTDYYYYMDV |
| 105 | 1672 | 1672 | ACCTCCCACGCGTATAATAGTGACTGGTTCGTGACGACTGACTACTAC |
| | | | TACTACATGGACGTC |
| 105 | 1673 | 1673 | GATATTGTGCTGACCCAGTCTCCATCCTCCCTGTCTGCATCTGTTGGA |
| | | | GACAGAGTCACCTTCACTTGCCGGGCAAGTCAGAGCATTAGCAACTA |
| | | | TTTGAATTGGTATCAGCAGAAACCAGGGAAAGCCCCTAAGGTCCTGA |
| | | | TCTATGGTGCTTCCAATTTGCTAAGTGGGGTCCCATCAAGGTTCATTG |
| | | | GCAGCGGATCTGGGACAGATTTCACTCTCACCATCAACAGTCTGCAA |
| | | | CCTGAAGATTTTGCAACTTACTACTGTCAACAGTGTTACAGTGCCCCG |
| | | | ATCACCTTCGGCCAAGGGACACGACTGGAGATTAAA |
| 105 | 1674 | 1674 | DIVLTQSPSSLSASVGDRVTFTCRASQSISNYLNWYQQKPGKAPKVLIYG |
| | | | ASNLLSGVPSRFIGSGSGTDFTLTINSLQPEDFATYYCQQCYSAPITFGQG |
| | | | TRLEIK |
| 105 | 1675 | 1675 | RASQSISNYLN |
| 105 | 1676 | 1676 | CGGGCAAGTCAGAGCATTAGCAACTATTTGAAT |
| 105 | 1677 | 1677 | GASNLLS |
| 105 | 1678 | 1678 | GGTGCTTCCAATTTGCTAAGT |
| 105 | 1679 | 1679 | QQCYSAPIT |
| 105 | 1680 | 1680 | CAACAGTGTTACAGTGCCCCGATCACC |
| 106 | 1681 | 1681 | CAGGTCCAGCTGGTGCAGTCTGGGGCTGAGGTGAAGAAGCCTGGGTC |
| | | | CTCGGTGAAGGTCTCCTGCACGGCCTCTGGAGGCAGCTTCAGCACCA |
| | | | ATAGTATTGCCTGGCTGAGGCAGACCCCTAGAGAAGGGCTGGAGTGG |
| | | | ATGGGAGGAATCATCCCTGTCTTTGGTGCAGCAAAATACGCACAGAA |
| | | | GTTCCAGGGCAGAGTCACGATTAGCGCGGACGCATCCACGACCACAG |
| | | | CCTACTTGGAGCTGCACAACCTGAGATCTGAGGACACTGCCGTCTATT |
| | | | ACTGCGCGAGAGGAATTTCCCCCAGGACAAACAGTGACTGGAACCAC |
| | | | AACTACTTCTACTACTACATGGACGTCTGGGGCAAAGGGACCACGGT |
| | | | CACCGTCTCCTCA |
| 106 | 1682 | 1682 | QVQLVQSGAEVKKPGSSVKVSCTASGGSFSTNSIAWLRQTPREGLEWMG |
| | | | GIIPVFGAAKYAQKFQGRVTISADASTTTAYLELHNLRSEDTAVYYCARG |
| | | | ISPRTNSDWNHNYFYYYMDVWGKGTTVTVSS |
| 106 | 1683 | 1683 | GSFSTNSIA |
| 106 | 1684 | 1684 | GGCAGCTTCAGCACCAATAGTATTGCC |
| 106 | 1685 | 1685 | GIIPVFGAAKYAQKFQG |
| 106 | 1686 | 1686 | GGAATCATCCCTGTCTTTGGTGCAGCAAAATACGCACAGAAGTTCCA |
| | | | GGGC |
| 106 | 1687 | 1687 | ARGISPRTNSDWNHNYFYYYMDV |
| 106 | 1688 | 1688 | GCGAGAGGAATTTCCCCCAGGACAAACAGTGACTGGAACCACAACTA |
| | | | CTTCTACTACTACATGGACGTC |
| 106 | 1689 | 1689 | GAAACGACACTCACGCAGTCTCCAGGCACCCTGTCTTTGTCTCCAGGG |
| | | | GAGAGAGCCACCCTCTCCTGCCGGGCCAGTCAGAGTATTTTCACCATC |
| | | | TACTTAGCCTGGTACCAGCAGAAACCTGGCCAGGCTCCCAGACTCCT |
| | | | CATCTATAGTGCATCCAACAGGGCCACTGGCATCCCAGACAGGTTCA |
| | | | GTGGCAGTGGGTCTGGGACAGACTTCACTCTCACCATCAGCAGCCTG |
| | | | GAGCCTGAAGATTTTGCAGTCTATTACTGCCACCACTATGGTACCTCA |
| | | | CCTCACACTTTTGGCCAGGGGACACGACTGGAGATTAAA |
| 106 | 1690 | 1690 | ETTLTQSPGTLSLSPGERATLSCRASQSIFTIYLAWYQQKPGQAPRLLIYS |
| | | | ASNRATGIPDRFSGSGSGTDFTLTISSLEPEDFAVYYCHHYGTSPHTFGQG |
| | | | TRLEIK |
| 106 | 1691 | 1691 | RASQSIFTIYLA |
| 106 | 1692 | 1692 | CGGGCCAGTCAGAGTATTTTCACCATCTACTTAGCC |
| 106 | 1693 | 1693 | SASNRAT |
| 106 | 1694 | 1694 | AGTGCATCCAACAGGGCCACT |
| 106 | 1695 | 1695 | HHYGTSPHT |
| 106 | 1696 | 1696 | CACCACTATGGTACCTCACCTCACACT |
| 107 | 1697 | 1697 | GAGGTGCAGCTGTTGGAGTCTGGTCCTGTGCTGGTGAAACCCACAGA |
| | | | GACCCTCACGCTGACCTGCACCGTCTCTGGGTTCTCACTCGCCAATCC |
| | | | TGACGTGGCTGTGGCCTGGATCCGTCAGCCCCCCGGGAAGGCCCTGG |
| | | | AGTGGCTTGCACACATTTTTTCGGGCGACGAAACATCCTACACCACAT |
| | | | CTCTGCAGAACAGACTCACCATCTCCAAGGACACCTCCAAAAGCCAG |
| | | | GTTGTCCTTATCATGACCAAGATGGACCCTCGAGACACCGGCACATA |
| | | | TTTCTGTGCACGGGTGTTGACTACCTGGCACGGACCGGACTACTGGG |
| | | | GCCAGGGGACCACGGTCACCGTCTCCTCA |
| 107 | 1698 | 1698 | EVQLLESGPVLVKPTETLTLTCTVSGFSLANPDVAVAWIRQPPGKALEW |
| | | | LAHIFSGDETSYTTSLQNRLTISKDTSKSQVVLIMTKMDPRDTGTYFCAR |
| | | | VLTTWHGPDYWGQGTTVTVSS |
| 107 | 1699 | 1699 | FSLANPDVAVA |
| 107 | 1700 | 1700 | TTCTCACTCGCCAATCCTGACGTGGCTGTGGCC |
| 107 | 1701 | 1701 | HIFSGDETSYTTSLQN |
| 107 | 1702 | 1702 | CACATTTTTTCGGGCGACGAAACATCCTACACCACATCTCTGCAGAAC |
| 107 | 1703 | 1703 | ARVLTTWHGPDY |
| 107 | 1704 | 1704 | GCACGGGTGTTGACTACCTGGCACGGACCGGACTAC |
| 107 | 1705 | 1705 | GAAACGACACTCACGCAGTCTCCACTCTCCCTGCCCGTCACCCTTGGA |
| | | | CAGCCGGCCTCCATCTCCTGCAGGTCTGATCAAAGCCTCGTATATCAT |
| | | | AATGGAAACACCTACGTGAGTTGGTTTCATCAGAGGCCAGGCCAATC |
| | | | TCCAAGGCGCCTAATTTATAAGGTTTCTATCCGGGACTCTGGGGTCCC |
| | | | AGACAGATTCAGCGGCAGTGGGTCAGGCACTGATTTCGCACTGAAAA |
| | | | TCAGCAGGGTGGAGGCTGAGGATCTTGGGGTTTATTACTGCATGCAA |
| | | | GGTTCACACTGGCCGCACACTTTTGGCCAGGGGACCAAAGTGGATAT |
| | | | CAAA |
| 107 | 1706 | 1706 | ETTLTQSPLSLPVTLGQPASISCRSDQSLVYHNGNTYVSWFHQRPGQSPR |
| | | | RLIYKVSIRDSGVPDRFSGSGSGTDFALKISRVEAEDLGVYYCMQGSHWP |
| | | | HTFGQGTKVDIK |
| 107 | 1707 | 1707 | RSDQSLVYHNGNTYVS |
| 107 | 1708 | 1708 | AGGTCTGATCAAAGCCTCGTATATCATAATGGAAACACCTACGTGAGT |
| 107 | 1709 | 1709 | KVSIRDS |
| 107 | 1710 | 1710 | AAGGTTTCTATCCGGGACTCT |
| 107 | 1711 | 1711 | MQGSHWPHT |
| 107 | 1712 | 1712 | ATGCAAGGTTCACACTGGCCGCACACT |
| 108 | 1713 | 1713 | GAGGTGCAGCTGGTGGAGTCTGGGGGAGGCTTGGTCCAGCCTGGGGG |
| | | | GTCCCTGAGACTCTCCTGTGCAGCCTCTGGATTCTCGTTTAGTACCTCT |
| | | | TGGATGAGTTGGGTCCGCCAGGCTCCAGGGAAAGGTCTGGAGTGGCT |
| | | | GGCCAACATAAAGGAAGATGGAAGTAAGAAAATCTATGTGGACTCTG |
| | | | TGAAGGGCCGCTTCTCCATATCCAGGGACAACGCCAAGAACTCACTG |
| | | | TATCTGCAAATGACCAGCCTAAGAGCCGAGGACACGGCCGTGTATTA |
| | | | TTGTGCGAGAGATGTGTGGGGGTGGGAGCTAGTCGGATGGTTGGACC |
| | | | CCTGGGGCCAGGGAACCCTGGTCACCGTCTCCTCA |
| 108 | 1714 | 1714 | EVQLVESGGGLVQPGGSLRLSCAASGFSFSTSWMSWVRQAPGKGLEWL |
| | | | ANIKEDGSKKIYVDSVKGRFSISRDNAKNSLYLQMTSLRAEDTAVYYCA |
| | | | RDVWGWELVGWLDPWGQGTLVTVSS |
| 108 | 1715 | 1715 | FSFSTSWMS |
| 108 | 1716 | 1716 | TTCTCGTTTAGTACCTCTTGGATGAGT |
| 108 | 1717 | 1717 | NIKEDGSKKIYVDSVKG |
| 108 | 1718 | 1718 | AACATAAAGGAAGATGGAAGTAAGAAAATCTATGTGGACTCTGTGAA |
| | | | GGGC |
| 108 | 1719 | 1719 | ARDVWGWELVGWLDP |
| 108 | 1720 | 1720 | GCGAGAGATGTGTGGGGGTGGGAGCTAGTCGGATGGTTGGACCCC |
| 108 | 1721 | 1721 | TCCTATGAGCTGACACAGCCACCCTCGGTATCAGTGGCCCCAGGAAA |
| | | | GACGGCCAGCATTACCTGTGGGGGAAGCAACATTGGAAGTAGAAGTG |
| | | | TGCACTGGTACCAGCAGAAGCCAGGCCAGGCCCCTGTGCTGGTCGTC |
| | | | TATGAGGATCACGACCGGCCCTCAGGGATCCCTGAGCGATTCTCTGG |
| | | | CTCCAACTCTGGGAATACGGCCACCCTGACCATCAGCAGGGTCGAAG |
| | | | CCGGGGACGAGGCCGACTATTACTGTCAGGTGTGGGATAGTAGTAGA |
| | | | GATCATGTGGTATTCGGCGGCGGGACCAAGGTCACCGTCCTA |
| 108 | 1722 | 1722 | SYELTQPPSVSVAPGKTASITCGGSNIGSRSVHWYQQKPGQAPVLVVYE |
| | | | DHDRPSGIPERFSGSNSGNTATLTISRVEAGDEADYYCQVWDSSRDHVV |
| | | | FGGGTKVTVL |
| 108 | 1723 | 1723 | GGSNIGSRSVH |
| 108 | 1724 | 1724 | GGGGGAAGCAACATTGGAAGTAGAAGTGTGCAC |
| 108 | 1725 | 1725 | EDHDRPS |
| 108 | 1726 | 1726 | GAGGATCACGACCGGCCCTCA |
| 108 | 1727 | 1727 | QVWDSSRDHVV |
| 108 | 1728 | 1728 | CAGGTGTGGGATAGTAGTAGAGATCATGTGGTA |
| 109 | 1729 | 1729 | GAGGTGCAGCTGGTGGAGTCTGGTCCTGCGCTGGTGAAACCCACACA |
| | | | GACCCTCACACTGACCTGCACCTTCTCTGGGTTCTCACTCAGCAGTAG |
| | | | AAGAATGTGTGTGAGTTGGATCCGTCAGCCCCCAGGGAAGGCCCTGG |
| | | | AGTGGCTTGCACGCATTGATTGGGATGATGATAAATCCTACAGCACA |
| | | | TCTCTGAAGACCAGGCTCACCATCGCCAAGGACACCTCCAAAAACCA |
| | | | GGTCGTCCTTACAATGACCAACATGGGCCCCGCGGACACAGCCACGT |
| | | | ATTACTGTGCACGGACTCCTATATATGATAGTAGTGGTTATTACCTCT |
| | | | ACTACTTTGACTCCTGGGGCCAGGGAACCCTGGTCACCGTCTCCTCA |
| 109 | 1730 | 1730 | EVQLVESGPALVKPTQTLTLTCTFSGFSLSSRRMCVSWIRQPPGKALEWL |
| | | | ARIDWDDDKSYSTSLKTRLTIAKDTSKNQVVLTMTNMGPADTATYYCA |
| | | | RTPIYDSSGYYLYYFDSWGQGTLVTVSS |
| 109 | 1731 | 1731 | FSLSSRRMCVS |
| 109 | 1732 | 1732 | TTCTCACTCAGCAGTAGAAGAATGTGTGTGAGT |
| 109 | 1733 | 1733 | RIDWDDDKSYSTSLKT |
| 109 | 1734 | 1734 | CGCATTGATTGGGATGATGATAAATCCTACAGCACATCTCTGAAGACC |
| 109 | 1735 | 1735 | ARTPIYDSSGYYLYYFDS |
| 109 | 1736 | 1736 | GCACGGACTCCTATATATGATAGTAGTGGTTATTACCTCTACTACTTT |
| | | | GACTCC |
| 109 | 1737 | 1737 | GAAACGACACTCACGCAGTCTCCATCCTCCCTGTCTGCATCTGTCGGA |
| | | | GACAGAGTCACCATCACTTGCCGGGCAAGTCAGAGCATTAGCAGCTA |
| | | | TTTAAATTGGTATCAGCAGAAACCAGGGAAAGCCCCTAAGCTCCTGA |
| | | | TCTATGCTGCATCCAGTTTGCAAAGTGGGGTCCCATCAAGGTTCAGTG |
| | | | GCAGTGGATCTGGGACAGATTTCACTCTCACCATCAGCAGTCTGCAA |
| | | | CCTGAAGATTTTGCAACTTACTACTGTCAACAGAGTTACAGTACCCCT |
| | | | GTGACTTTTGGCCAGGGGACCAAGGTGGAGATCAAA |
| 109 | 1738 | 1738 | ETTLTQSPSSLSASVGDRVTITCRASQSISSYLNWYQQKPGKAPKLLIYAA |
| | | | SSLQSGVPSRFSGSGSGTDFTLTISSLQPEDFATYYCQQSYSTPVTFGQGT |
| | | | KVEIK |
| 109 | 1739 | 1739 | RASQSISSYLN |
| 109 | 1740 | 1740 | CGGGCAAGTCAGAGCATTAGCAGCTATTTAAAT |
| 109 | 1741 | 1741 | AASSLQS |
| 109 | 1742 | 1742 | GCTGCATCCAGTTTGCAAAGT |
| 109 | 1743 | 1743 | QQSYSTPVT |
| 109 | 1744 | 1744 | CAACAGAGTTACAGTACCCCTGTGACT |
| 110 | 1745 | 1745 | CAGGTCCAGCTTGTGCAGTCTGGGGGAGGCGTGGTCCAGCCTGGGAG |
| | | | GTCCCTGAGACTCTCCTGTGCAGCCTCTGGATTCACCTTCAGTGACTA |
| | | | TGCTATGCACTGGGTCCGCCAGGCTCCAGGCAAGGGCCTCCAGTGGG |
| | | | TGTCACTTATATCATATAATGGACGTAAAAAATATTACGCAGACTCCG |
| | | | TGAAGGGCCGATTCACCATCTCCAGAGACGATTCCAAGAACACGCTG |
| | | | TATCTGCAAATGAACCCCCTGAGACCTGACGACACGGCTGTCTATTAC |
| | | | TGTGCGAGAGATGGGGATATTGTAGCTGTTCCAGCTGCTATCGGGTTG |
| | | | GACTACTGGGGCCAGGGAACCCTGGTCACCGTCTCCTCA |
| 110 | 1746 | 1746 | QVQLVQSGGGVVQPGRSLRLSCAASGFTFSDYAMHWVRQAPGKGLQW |
| | | | VSLISYNGRKKYYADSVKGRFTISRDDSKNTLYLQMNPLRPDDTAVYYC |
| | | | ARDGDIVAVPAAIGLDYWGQGTLVTVSS |
| 110 | 1747 | 1747 | FTFSDYAMH |
| 110 | 1748 | 1748 | TTCACCTTCAGTGACTATGCTATGCAC |
| 110 | 1749 | 1749 | LISYNGRKKYYADSVKG |
| 110 | 1750 | 1750 | CTTATATCATATAATGGACGTAAAAAATATTACGCAGACTCCGTGAA |
| | | | GGGC |
| 110 | 1751 | 1751 | ARDGDIVAVPAAIGLDY |
| 110 | 1752 | 1752 | GCGAGAGATGGGGATATTGTAGCTGTTCCAGCTGCTATCGGGTTGGA |
| | | | CTAC |
| 110 | 1753 | 1753 | GATATTGTGCTGACCCAGTCTCCAGAGTCCCTGGCTGTGTCTCTGGGC |
| | | | GAGAGGGCCACCATCAACTGCAACTCCAGCCAGAGTGTTTTATACAC |
| | | | CTCCAACAACAAGAACTACTTAGCTTGGTACCAGCAGAAATCAGGAC |
| | | | AGCCTCCTAAGCTGCTCATTTACTGGGCATCTACCCGGGAATCCGGGG |
| | | | TCCCTGAGCGATTCAGTGGCAGCGGGTCTGGGACAGATTTCACTCTCA |
| | | | CCATCAGCAGCCTGCAGGCTGAAGATGTGGCAGTTTATTACTGTCAG |
| | | | CAATATTCTAGTCCTCCGTACACTTTTGGCCAGGGGACCAAGCTGGAG |
| | | | ATCAAA |
| 110 | 1754 | 1754 | DIVLTQSPESLAVSLGERATINCNSSQSVLYTSNNKNYLAWYQQKSGQPP |
| | | | KLLIYWASTRESGVPERFSGSGSGTDFTLTISSLQAEDVAVYYCQQYSSPP |
| | | | YTFGQGTKLEIK |
| 110 | 1755 | 1755 | NSSQSVLYTSNNKNYLA |
| 110 | 1756 | 1756 | AACTCCAGCCAGAGTGTTTTATACACCTCCAACAACAAGAACTACTT |
| | | | AGCT |
| 110 | 1757 | 1757 | WASTRES |
| 110 | 1758 | 1758 | TGGGCATCTACCCGGGAATCC |
| 110 | 1759 | 1759 | QQYSSPPYT |
| 110 | 1760 | 1760 | CAGCAATATTCTAGTCCTCCGTACACT |
| 111 | 1761 | 1761 | CAGGTGCAGCTGCAGGAGTCCGGCCCAGGACTAGTGAAGCCTTCAGA |
| | | | GACCCTGTCCCTCACTTGCAGTGTCTCTGGTGGCTCCATCAAAAGAGG |
| | | | TGCTTACTTCTGGACCTGGATCCGCCAGCGGCCAGGGAAGGGCCTGG |
| | | | AGTGGATTGGGTCCATGCATGACAGCGGCGACTACTACAACCCGTCC |
| | | | CTCAAGACACGCGTTACCATTTTGGGAGACACGACTAAGAACCACTT |
| | | | CACCCTGAAGTTGACCTCCGTGACTGTCGCGGACACGGCCTTATATTA |
| | | | CTGTGCGAGGGGGCGCGGATACAGCTATGGCTGGCGTTTCTTTGACA |
| | | | ACTGGGGCCAGGGAACCCTGGTCACCGTCTCCTCA |
| 111 | 1762 | 1762 | QVQLQESGPGLVKPSETLSLTCSVSGGSIKRGAYFWTWIRQRPGKGLEWI |
| | | | GSMHDSGDYYNPSLKTRVTILGDTTKNHFTLKLTSVTVADTALYYCARG |
| | | | RGYSYGWRFFDNWGQGTLVTVSS |
| 111 | 1763 | 1763 | GSIKRGAYFWT |
| 111 | 1764 | 1764 | GGCTCCATCAAAAGAGGTGCTTACTTCTGGACC |
| 111 | 1765 | 1765 | SMHDSGDYYNPSLKT |
| 111 | 1766 | 1766 | TCCATGCATGACAGCGGCGACTACTACAACCCGTCCCTCAAGACA |
| 111 | 1767 | 1767 | ARGRGYSYGWRFFDN |
| 111 | 1768 | 1768 | GCGAGGGGGCGCGGATACAGCTATGGCTGGCGTTTCTTTGACAAC |
| 111 | 1769 | 1769 | AATTTTATGCTGACTCAGCCCCCCTCGGTGTCAGTGTCCCCAGGACAC |
| | | | TCGACCAGGATCACCTGCTCTGGAGATGCTTTGCCAAAGCAATATGCT |
| | | | TATTGGTATCAGCAGAAGCCAGGCCAGGCCCCTGTCCTGATAATGTC |
| | | | CAAAGACAGTGAGAGGCCCTCAGGGATCCCTGAGCGATTCACTGGCT |
| | | | CCAGCTCAGGGACTACAGTCACTTTGACCATCAGTGGAGTCCAGGCA |
| | | | GAGGACGAGGCCGACTATTACTGTCAATCAGGAGACACCAGTGGAAG |
| | | | TTATGTCGTCTTCGGCGGAGGGACCAAGGTCACCGTCCTA |
| 111 | 1770 | 1770 | NFMLTQPPSVSVSPGHSTRITCSGDALPKQYAYWYQQKPGQAPVLIMSK |
| | | | DSERPSGIPERFTGSSSGTTVTLTISGVQAEDEADYYCQSGDTSGSYVVFG |
| | | | GGTKVTVL |
| 111 | 1771 | 1771 | SGDALPKQYAY |
| 111 | 1772 | 1772 | TCTGGAGATGCTTTGCCAAAGCAATATGCTTAT |
| 111 | 1773 | 1773 | KDSERPS |
| 111 | 1774 | 1774 | AAAGACAGTGAGAGGCCCTCA |
| 111 | 1775 | 1775 | QSGDTSGSYVV |
| 111 | 1776 | 1776 | CAATCAGGAGACACCAGTGGAAGTTATGTCGTC |
| 112 | 1777 | 1777 | GAGGTGCAGCTGTTGGAGTCCGGGCCAGAGTTGAAGAAGCCTGGGTC |
| | | | CTCGGTGAAGGTGTCTTGCAAGGCCTCTGCAGACACTTTCAATGGTCA |
| | | | CTCAATTGCTTGGGTGCGGCAGGCCCCTGGACAAGGGCTTGAGTGGG |
| | | | TGGGAGGATTCATCCCCATTTTTGGGAAAGCATACTACGCACAGAAC |
| | | | TTCCAGGGCACAGTCACGATTTCCGCGGATTCTTCCACGAGAACAGTC |
| | | | TACATGGATCTGTTCAACCTGAGATCTGAGGACACGGCCGTCTATTAC |
| | | | TGTGCGAGATCAAGGAAAAATGTTATCGGGGACACCAGTGCCTGGGA |
| | | | ACATATGTACTTCTACATGGACGTCTGGGGCACCGGGACCACGGTCA |
| | | | CCGTCTCCTCA |
| 112 | 1778 | 1778 | EVQLLESGPELKKPGSSVKVSCKASADTFNGHSIAWVRQAPGQGLEWV |
| | | | GGFIPIFGKAYYAQNFQGTVTISADSSTRTVYMDLFNLRSEDTAVYYCAR |
| | | | SRKNVIGDTSAWEHMYFYMDVWGTGTTVTVSS |
| 112 | 1779 | 1779 | DTFNGHSIA |
| 112 | 1780 | 1780 | GACACTTTCAATGGTCACTCAATTGCT |
| 112 | 1781 | 1781 | GFIPIFGKAYYAQNFQG |
| 112 | 1782 | 1782 | GGATTCATCCCCATTTTTGGGAAAGCATACTACGCACAGAACTTCCAG |
| | | | GGC |
| 112 | 1783 | 1783 | ARSRKNVIGDTSAWEHMYFYMDV |
| 112 | 1784 | 1784 | GCGAGATCAAGGAAAAATGTTATCGGGGACACCAGTGCCTGGGAAC |
| | | | ATATGTACTTCTACATGGACGTC |
| 112 | 1785 | 1785 | GAAATTGTATTGACGCAGTCTCCAGGCACCCTGTCTTTGTCTCCAGGG |
| | | | GAAAGAGTCACTCTCTCCTGCAGGGCCAGTGAGAGTATTAATAAGAA |
| | | | TACCTACTTAGCCTGGTACCAACAGAAACCTGGCCAGGCTCCCAGGC |
| | | | TCCTCATTTATGGAGCATCCAGCAGGGCCACTGGCATCCCAGACAGG |
| | | | TTCAGTGGCAGTGGGTCTGGGACAGACTTCACTCTCACCATCAGCAG |
| | | | ACTGGAGCCTGAAGATTCTGCTGTGTATTACTGTCAGCAATATGGTAG |
| | | | GTCAATGACTTTCGGCGGAGGGACCAAGGTGGAAATCAAA |
| 112 | 1786 | 1786 | EIVLTQSPGTLSLSPGERVTLSCRASESINKNTYLAWYQQKPGQAPRLLIY |
| | | | GASSRATGIPDRFSGSGSGTDFTLTISRLEPEDSAVYYCQQYGRSMTFGG |
| | | | GTKVEIK |
| 112 | 1787 | 1787 | RASESINKNTYLA |
| 112 | 1788 | 1788 | AGGGCCAGTGAGAGTATTAATAAGAATACCTACTTAGCC |
| 112 | 1789 | 1789 | GASSRAT |
| 112 | 1790 | 1790 | GGAGCATCCAGCAGGGCCACT |
| 112 | 1791 | 1791 | QQYGRSMT |
| 112 | 1792 | 1792 | CAGCAATATGGTAGGTCAATGACT |
| 113 | 1793 | 1793 | CAGGTCCAGCTTGTACAGTCTGGGACTGAGGTGAAGAAGCCTGGGTC |
| | | | CTCGGTGAATGTCTCCTGCAAGGCTGTTGGAGGCAAGTTCACCAGTTA |
| | | | TAATATTAACTGGGTGCGACAGGCCCCTGGACAAGGCCTTGAGTGGA |
| | | | TGGGAAGGATCATCCCAACCCTTGGTATAACATACTTCGCACAGAAG |
| | | | TTCCAGGGCAGACTCACGATTAACGCGGACAGATCCACGAGCACCGC |
| | | | CTACATGGATCTGAGCAGCCTGAGATCTGACGATACGGCCGTTTATTA |
| | | | TTGTGCGAGATCCAATCCCGTTGCTCGCGATTTTTGGAGTGGATATTC |
| | | | TGACGACTCCTCCTATGCTATGGACGTCTGGGGCCAAGGGACCACGG |
| | | | TCACCGTCTCCTCA |
| 113 | 1794 | 1794 | QVQLVQSGTEVKKPGSSVNVSCKAVGGKFTSYNINWVRQAPGQGLEW |
| | | | MGRIIPTLGITYFAQKFQGRLTINADRSTSTAYMDLSSLRSDDTAVYYCA |
| | | | RSNPVARDFWSGYSDDSSYAMDVWGQGTTVTVSS |
| 113 | 1795 | 1795 | GKFTSYNIN |
| 113 | 1796 | 1796 | GGCAAGTTCACCAGTTATAATATTAAC |
| 113 | 1797 | 1797 | RIIPTLGITYFAQKFQG |
| 113 | 1798 | 1798 | AGGATCATCCCAACCCTTGGTATAACATACTTCGCACAGAAGTTCCA |
| | | | GGGC |
| 113 | 1799 | 1799 | ARSNPVARDFWSGYSDDSSYAMDV |
| 113 | 1800 | 1800 | GCGAGATCCAATCCCGTTGCTCGCGATTTTTGGAGTGGATATTCTGAC |
| | | | GACTCCTCCTATGCTATGGACGTC |
| 113 | 1801 | 1801 | GAAACGACACTCACGCAGTCTCCAGGAACCCTGTCTTTGTCTCCAGG |
| | | | GGACAGAGTCAGCCTCTCCTGCAGGGCCAGTCAGACTGTTGACAAGA |
| | | | ACTACGTAGCCTGGTACCAGCAGAAGCCTGGCCAGGCTCCCAGGCTC |
| | | | CTCATCTATGGTGCATCCAAGAGGGCCGCTGACATCCCAGACAGGTT |
| | | | CAGTGGCAGTGGCTCTGGGGCAGACTTCACTCTCACCATCAGCAGAC |
| | | | TGGAGCCTGAAGATTTTGCTGTGTATCACTGTCAGCAGTATGGAGCTT |
| | | | CAGCGTTCAGTTTCGGCGGCGGGACCAAGCTGGAGATCAAA |
| 113 | 1802 | 1802 | ETTLTQSPGTLSLSPGDRVSLSCRASQTVDKNYVAWYQQKPGQAPRLLI |
| | | | YGASKRAADIPDRFSGSGSGADFTLTISRLEPEDFAVYHCQQYGASAFSF |
| | | | GGGTKLEIK |
| 113 | 1803 | 1803 | RASQTVDKNYVA |
| 113 | 1804 | 1804 | AGGGCCAGTCAGACTGTTGACAAGAACTACGTAGCC |
| 113 | 1805 | 1805 | GASKRAA |
| 113 | 1806 | 1806 | GGTGCATCCAAGAGGGCCGCT |
| 113 | 1807 | 1807 | QQYGASAFS |
| 113 | 1808 | 1808 | CAGCAGTATGGAGCTTCAGCGTTCAGT |
| 114 | 1809 | 1809 | CAGGTGCAGCTGGTGCAATCTGGGGGAGGCTTGGTAAAGCCGGGGGG |
| | | | GTCCCTTAGACTCTCATGTGCAGCCTCTGGATTCGCTTTCAGTAACGC |
| | | | CTGGATGAGCTGGGTCCGCCAGGCTCCAGGGAAGGGGCTGGAGTGGC |
| | | | TTGGCCGTATTAAAAGCGAAACTGACGGTGGGACAACAGACTACGCT |
| | | | GCACCCGTGAAAGGCAGATTCAGCATCTCAAGAGATGATTCCAGAAA |
| | | | CACGCTGTATCTGCAAATGAACAGCCTGGAAAGCGAGGACACAGCCG |
| | | | TTTATTACTGTACCACAGGCCCACCCTATAAGTATTTTGATAGTACTG |
| | | | GTTATTCGGTCGTTGACTACTGGGGCCAGGGAACCCTGGTCACCGTCT |
| | | | CCTCA |
| 114 | 1810 | 1810 | QVQLVQSGGGLVKPGGSLRLSCAASGFAFSNAWMSWVRQAPGKGLEW |
| | | | LGRIKSETDGGTTDYAAPVKGRFSISRDDSRNTLYLQMNSLESEDTAVYY |
| | | | CTTGPPYKYFDSTGYSVVDYWGQGTLVTVSS |
| 114 | 1811 | 1811 | FAFSNAWMS |
| 114 | 1812 | 1812 | TTCGCTTTCAGTAACGCCTGGATGAGC |
| 114 | 1813 | 1813 | RIKSETDGGTTDYAAPVKG |
| 114 | 1814 | 1814 | CGTATTAAAAGCGAAACTGACGGTGGGACAACAGACTACGCTGCACC |
| | | | CGTGAAAGGC |
| 114 | 1815 | 1815 | TTGPPYKYFDSTGYSVVDY |
| 114 | 1816 | 1816 | ACCACAGGCCCACCCTATAAGTATTTTGATAGTACTGGTTATTCGGTC |
| | | | GTTGACTAC |
| 114 | 1817 | 1817 | TCCTATGAGCTGACACAGCCACCCTCAGCGTCTGGGACCCCCGGGCA |
| | | | GAGGGTCACCATCTCTTGTTCTGGAAGCAGCTCCAATATCGGAAGTA |
| | | | ATTATGTATACTGGTACCAGCAGCTCCCAGGAACGGCCCCCAGACTC |
| | | | CTCATCTATAGTACTAATCAGCGGCCCTCAGGGGTCCCTGACCGATTC |
| | | | TCTGGCTCCCAGTCTGGCACCTCAGCCTCCCTGGCCATCAGTGGGCTC |
| | | | CGGTCCGACGATGAGGCTGATTATTACTGTGCAGCATGGGATGACAG |
| | | | GATGAGTGGTCCGGTGTTCGGCGGAGGGACCAAGCTCACCGTCCTA |
| 114 | 1818 | 1818 | SYELTQPPSASGTPGQRVTISCSGSSSNIGSNYVYWYQQLPGTAPRLLIYS |
| | | | TNQRPSGVPDRFSGSQSGTSASLAISGLRSDDEADYYCAAWDDRMSGPV |
| | | | FGGGTKLTVL |
| 114 | 1819 | 1819 | SGSSSNIGSNYVY |
| 114 | 1820 | 1820 | TCTGGAAGCAGCTCCAATATCGGAAGTAATTATGTATAC |
| 114 | 1821 | 1821 | STNQRPS |
| 114 | 1822 | 1822 | AGTACTAATCAGCGGCCCTCA |
| 114 | 1823 | 1823 | AAWDDRMSGPV |
| 114 | 1824 | 1824 | GCAGCATGGGATGACAGGATGAGTGGTCCGGTG |
| 115 | 1825 | 1825 | CAGGTCCAGCTTGTACAGTCTGGGGGAGGCTTGGTGCAGCCTGGGGG |
| | | | GTCCCTAAGACTCTCCTGTGCAGCCTCTGGACTCACCTTTAGCTCTTA |
| | | | TGCCATGTCCTGGGTCCGCCAGGCTCCAGGGAAGGAACTGGAGTGGG |
| | | | TCTCATCTATTAGTGAAAGTGGTGTTGATACATACTACGCAGACTCCG |
| | | | TGAAGGGCCGGTTCACCGTCTCCAGAGACAATTCCAAAAGCACGCTG |
| | | | TATCTGCAAATGAGCAGCCTGGGAGGCGACGACACGGCCGTATATTA |
| | | | TTGCGCGAAGGCATACTGTAGTAATAAGGCCTGCCACGGGGGCTACT |
| | | | TTGACTACTGGGGCCAGGGAACCCTGGTCACCGTCTCCTCA |
| 115 | 1826 | 1826 | QVQLVQSGGGLVQPGGSLRLSCAASGLTFSSYAMSWVRQAPGKELEWV |
| | | | SSISESGVDTYYADSVKGRFTVSRDNSKSTLYLQMSSLGGDDTAVYYCA |
| | | | KAYCSNKACHGGYFDYWGQGTLVTVSS |
| 115 | 1827 | 1827 | LTFSSYAMS |
| 115 | 1828 | 1828 | CTCACCTTTAGCTCTTATGCCATGTCC |
| 115 | 1829 | 1829 | SISESGVDTYYADSVKG |
| 115 | 1830 | 1830 | TCTATTAGTGAAAGTGGTGTTGATACATACTACGCAGACTCCGTGAA |
| | | | GGGC |
| 115 | 1831 | 1831 | AKAYCSNKACHGGYFDY |
| 115 | 1832 | 1832 | GCGAAGGCATACTGTAGTAATAAGGCCTGCCACGGGGGCTACTTTGA |
| | | | CTAC |
| 115 | 1833 | 1833 | GAAACGACACTCACGCAGTCTCCAGACACCCTGTCCTTGTCTCCAGG |
| | | | GGAAAGGGCCACCCTCTCCTGCAGGGCCAGTCAGAGTGTTAGGAACT |
| | | | ACTTAGCCTGGTACCGGCAGAAACCTGGCCAGGCTCCCAGGCTCCTC |
| | | | ATCTATGATGCATCCAACCTGGCCACTGGCATCCCAGCCAGGTTCAGT |
| | | | GGCAGCGGGTCTGGGACAGACTTCACTCTCACCATCAGCAGCCTAGA |
| | | | GCCTGAAGATTTTGCAGTTTATTACTGTCACCAGCGTAGCGACTGGCC |
| | | | GCTCACTTTCGGCCCTGGGACCAAGGTGGAAATCAAA |
| 115 | 1834 | 1834 | ETTLTQSPDTLSLSPGERATLSCRASQSVRNYLAWYRQKPGQAPRLLIYD |
| | | | ASNLATGIPARFSGSGSGTDFTLTISSLEPEDFAVYYCHQRSDWPLTFGPG |
| | | | TKVEIK |
| 115 | 1835 | 1835 | RASQSVRNYLA |
| 115 | 1836 | 1836 | AGGGCCAGTCAGAGTGTTAGGAACTACTTAGCC |
| 115 | 1837 | 1837 | DASNLAT |
| 115 | 1838 | 1838 | GATGCATCCAACCTGGCCACT |
| 115 | 1839 | 1839 | HQRSDWPLT |
| 115 | 1840 | 1840 | CACCAGCGTAGCGACTGGCCGCTCACT |
| 116 | 1841 | 1841 | GAGGTGCAGCTGGTGGAGTCGGGGGGAGGCTTGGTCCAGCCTGGGGG |
| | | | GTCCCTGAGACTCTCCTGTGCAGCCTCTGGATTCACCTTTAGGAGCTA |
| | | | TTGGATGACCTGGGTCCGCCAGGCTCCAGGGAAAGGGCTGGAGTGGG |
| | | | TGGCCAGCATAAACGATGAGGGGAATACTAAATACTATGTGGACTCT |
| | | | CTGAAGGGCCGATTCACCATCTCCAGAGACAACGCCAAGAACTCACT |
| | | | TTATCTCCAAATGAACAGCCTGCGAGCCGAGGACACGGCTGTTTATT |
| | | | ACTGTGCGAGGGAGTCCGGTCTGCCCCGGGGTGCCTTTCAAATCTGG |
| | | | GGCCCAGGGACAATGGTCACCGTCTCTTCA |
| 116 | 1842 | 1842 | EVQLVESGGGLVQPGGSLRLSCAASGFTFRSYWMTWVRQAPGKGLEW |
| | | | VASINDEGNTKYYVDSLKGRFTISRDNAKNSLYLQMNSLRAEDTAVYYC |
| | | | ARESGLPRGAFQIWGPGTMVTVSS |
| 116 | 1843 | 1843 | FTFRSYWMT |
| 116 | 1844 | 1844 | TTCACCTTTAGGAGCTATTGGATGACC |
| 116 | 1845 | 1845 | SINDEGNTKYYVDSLKG |
| 116 | 1846 | 1846 | AGCATAAACGATGAGGGGAATACTAAATACTATGTGGACTCTCTGAA |
| | | | GGGC |
| 116 | 1847 | 1847 | ARESGLPRGAFQI |
| 116 | 1848 | 1848 | GCGAGGGAGTCCGGTCTGCCCCGGGGTGCCTTTCAAATC |
| 116 | 1849 | 1849 | GAAATTGTATTGACACAGTCTCCAGTCACCCTGTCTTTGTCTCCAGGG |
| | | | GAAAGAGCCACCCTCTCATGCAGGGCCAGTCAGAGTGTTGGCACCTT |
| | | | CTTAGCCTGGTATCAACACAAACCTGGCCAGGCTCCCAGGCTCCTCAT |
| | | | CTATGATGCATCCAACAGGGCCTCTGCCATCCCAGCCAGGTTCAGTG |
| | | | GCAGTGGGTCTGGGACAGACTTCACTCTCACCATCAGCAGCCTGGAG |
| | | | CCTGAAGATTTTGCAGTTTATTACTGTCAGCATCGTAGCGACTGGTGG |
| | | | ACGTTCGGCCAAGGGACCAAGGTGGAAATCAAA |
| 116 | 1850 | 1850 | EIVLTQSPVTLSLSPGERATLSCRASQSVGTFLAWYQHKPGQAPRLLIYD |
| | | | ASNRASAIPARFSGSGSGTDFTLTISSLEPEDFAVYYCQHRSDWWTFGQG |
| | | | TKVEIK |
| 116 | 1851 | 1851 | RASQSVGTFLA |
| 116 | 1852 | 1852 | AGGGCCAGTCAGAGTGTTGGCACCTTCTTAGCC |
| 116 | 1853 | 1853 | DASNRAS |
| 116 | 1854 | 1854 | GATGCATCCAACAGGGCCTCT |
| 116 | 1855 | 1855 | QHRSDWWT |
| 116 | 1856 | 1856 | CAGCATCGTAGCGACTGGTGGACG |
| 117 | 1857 | 1857 | CAGGTGCAGCTACAGCAGTGGGGCGCAGGACTGTTGAAGCCTTCGGA |
| | | | GACCCTGTCCCTCACCTGCCAAGTCTATGGTGTGTCCTTCAGTGATTA |
| | | | CTACTGGAACTGGATCCGCCAGTCCCCAGGGAAGGGACTGGAGTGGA |
| | | | TTGGGGACGTCAATCATATTGGAAACACCGACTACAACCCGTCCCTC |
| | | | AAGAGTCGAGTCTCCATATCAGTAGACACGTCCAAGAACCAGTTCTC |
| | | | CCTCACCCTGCGCTCTGTGACCGCCGCAGACACGGCTCTATACTACTG |
| | | | TGCGAGAGGCCGTAAACTTTTTGAAGTGCCTCCCAAGGCCCCCGACT |
| | | | ACTGGGGCCAGGGAACCCTGGTCACCGTCTCCTCA |
| 117 | 1858 | 1858 | QVQLQQWGAGLLKPSETLSLTCQVYGVSFSDYYWNWIRQSPGKGLEWI |
| | | | GDVNHIGNTDYNPSLKSRVSISVDTSKNQFSLTLRSVTAADTALYYCARG |
| | | | RKLFEVPPKAPDYWGQGTLVTVSS |
| 117 | 1859 | 1859 | VSFSDYYWN |
| 117 | 1860 | 1860 | GTGTCCTTCAGTGATTACTACTGGAAC |
| 117 | 1861 | 1861 | DVNHIGNTDYNPSLKS |
| 117 | 1862 | 1862 | GACGTCAATCATATTGGAAACACCGACTACAACCCGTCCCTCAAGAGT |
| 117 | 1863 | 1863 | ARGRKLFEVPPKAPDY |
| 117 | 1864 | 1864 | GCGAGAGGCCGTAAACTTTTTGAAGTGCCTCCCAAGGCCCCCGACTAC |
| 117 | 1865 | 1865 | GATATTGTGATGACGCAGTCTCCAGGCACCCTGTCTTTGTCTCCAGGG |
| | | | GAAAGAGCCACCCTCTCCTGCAGGGCCAGTCAGAGTGTGAGCAGCAC |
| | | | CTACTTAGCCTGGTACCAGCAGAAGCCTGGCCAGGCTCCCAGGCTCC |
| | | | TCATCTATGGTGCGTCCATCAGGGCCACTGGCATCCCAGACAGGTTCA |
| | | | GTGGCGTTGGGTCTGGGACAGACTTCACTCTCACCATCAGCAGACTG |
| | | | GAGCCTGAAGATGTTGCAGTGTATTACTGTCAGCAGTATGGGAGCTC |
| | | | ACCTCAGACGTTCGGCCAAGGGACCAAGGTGGAAATCAAA |
| 117 | 1866 | 1866 | DIVMTQSPGTLSLSPGERATLSCRASQSVSSTYLAWYQQKPGQAPRLLIY |
| | | | GASIRATGIPDRFSGVGSGTDFTLTISRLEPEDVAVYYCQQYGSSPQTFGQ |
| | | | GTKVEIK |
| 117 | 1867 | 1867 | RASQSVSSTYLA |
| 117 | 1868 | 1868 | AGGGCCAGTCAGAGTGTGAGCAGCACCTACTTAGCC |
| 117 | 1869 | 1869 | GASIRAT |
| 117 | 1870 | 1870 | GGTGCGTCCATCAGGGCCACT |
| 117 | 1871 | 1871 | QQYGSSPQT |
| 117 | 1872 | 1872 | CAGCAGTATGGGAGCTCACCTCAGACG |
| 118 | 1873 | 1873 | CAGGTGCAGCTGGTGGAGTCTGGGGGAGGCTTGATTCAGCCTGGGGC |
| | | | GTCCCTGAGACTCTCCTGTGGAGCCTATGGATTCAGTTTCAGCAGCTC |
| | | | TGCCATGAGCTGGGTCCGCCAGGCTCCAGGTAAGGGGCTGGAGTGGG |
| | | | TCTCAGCTATTAGTGATAATGGTGGTAGCACATACTACGCAGACTCCG |
| | | | TGCAGGGCCGGTTCACCATCTCCAGAGACAATTCCAAGAACACGCTG |
| | | | TATCTGCAACTGAACAGGCTGAGAGCCGAGGACACGGCCATATATTA |
| | | | CTGTGCGAAAGCATATTGTAGTGATAGCTGCCACGGGGGCTACTTTG |
| | | | ACTACTGGGGCCAGGGAACCCTGGTCACCGTCTCCTCA |
| 118 | 1874 | 1874 | QVQLVESGGGLIQPGASLRLSCGAYGFSFSSSAMSWVRQAPGKGLEWVS |
| | | | AISDNGGSTYYADSVQGRFTISRDNSKNTLYLQLNRLRAEDTAIYYCAK |
| | | | AYCSDSCHGGYFDYWGQGTLVTVSS |
| 118 | 1875 | 1875 | FSFSSSAMS |
| 118 | 1876 | 1876 | TTCAGTTTCAGCAGCTCTGCCATGAGC |
| 118 | 1877 | 1877 | AISDNGGSTYYADSVQG |
| 118 | 1878 | 1878 | GCTATTAGTGATAATGGTGGTAGCACATACTACGCAGACTCCGTGCA |
| | | | GGGC |
| 118 | 1879 | 1879 | AKAYCSDSCHGGYFDY |
| 118 | 1880 | 1880 | GCGAAAGCATATTGTAGTGATAGCTGCCACGGGGGCTACTTTGACTAC |
| 118 | 1881 | 1881 | GAAATTGTGTTGACGCAGTCTCCAGCCACCCTGTCTTTGTCTCCAGGG |
| | | | GATAGAGCCACCCTCTCCTGCAGGGCCAGTCAGAGTGTTAGCAGCTC |
| | | | CTTCGCCTGGTACCAACAGAAACCTGGCCAGGCTCCCAGGCTCCTCAT |
| | | | CTATGCTGTATCCAACAGGGCCACTGGCATCCCAGCCAGGTTCAGTG |
| | | | GCAGTGGGTCTGGGACAGACTTCACTCTCACCATCAGCACCCTAGAG |
| | | | CCTGAAGACTTTGCAGTTTATTACTGTCAGCAGCGTAGCACCTGGCCG |
| | | | CTCACTTTCGGCCCTGGGACCAAGGTGGAGATCAAA |
| 118 | 1882 | 1882 | EIVLTQSPATLSLSPGDRATLSCRASQSVSSSFAWYQQKPGQAPRLLIYAV |
| | | | SNRATGIPARFSGSGSGTDFTLTISTLEPEDFAVYYCQQRSTWPLTFGPGT |
| | | | KVEIK |
| 118 | 1883 | 1883 | RASQSVSSSFA |
| 118 | 1884 | 1884 | AGGGCCAGTCAGAGTGTTAGCAGCTCCTTCGCC |
| 118 | 1885 | 1885 | AVSNRAT |
| 118 | 1886 | 1886 | GCTGTATCCAACAGGGCCACT |
| 118 | 1887 | 1887 | QQRSTWPLT |
| 118 | 1888 | 1888 | CAGCAGCGTAGCACCTGGCCGCTCACT |
| 119 | 1889 | 1889 | GAGGTGCAGCTGTTGGAGTCGGGGGGAGGCTTGGTGAAGCCTGGGGG |
| | | | GTCCCTAAGACTCTCATGTGCAGCCTCTGGATTCATTTTCACTAACGC |
| | | | CTGGATGAGCTGGGTCCGCCAGGCTCCAGGGAAGGGGCTGGAGTGGG |
| | | | TTGGCCGTATTAAAAGGAAAACTGAAACTGGGACAACAGACTACGCT |
| | | | CCACCCGTGAAAGGCAGATTCACCATCTCAAGAGATGATTCAAGAAG |
| | | | CACGCTGTATCTGCAAATGAACAGCCTGAAAACCGAGGACACAGCCG |
| | | | TGTATTACTGTACGACAGGCCCACCCTATCAGTACTATGACAGTACTG |
| | | | GTTATTCGGTCGTTGACTACTGGGGCCAGGGAACCCTGGTCACCGTCT |
| | | | CCTCA |
| 119 | 1890 | 1890 | EVQLLESGGGLVKPGGSLRLSCAASGFIFTNAWMSWVRQAPGKGLEWV |
| | | | GRIKRKTETGTTDYAPPVKGRFTISRDDSRSTLYLQMNSLKTEDTAVYYC |
| | | | TTGPPYQYYDSTGYSVVDYWGQGTLVTVSS |
| 119 | 1891 | 1891 | FIFTNAWMS |
| 119 | 1892 | 1892 | TTCATTTTCACTAACGCCTGGATGAGC |
| 119 | 1893 | 1893 | RIKRKTETGTTDYAPPVKG |
| 119 | 1894 | 1894 | CGTATTAAAAGGAAAACTGAAACTGGGACAACAGACTACGCTCCACC |
| | | | CGTGAAAGGC |
| 119 | 1895 | 1895 | TTGPPYQYYDSTGYSVVDY |
| 119 | 1896 | 1896 | ACGACAGGCCCACCCTATCAGTACTATGACAGTACTGGTTATTCGGTC |
| | | | GTTGACTAC |
| 119 | 1897 | 1897 | TCCTATGAGCTGACTCAGCCACCCTCAGCGTCCGGGACCCCCGGGCA |
| | | | GAGGGTCACCATCTCTTGTTCTGGAAGCAGCTCCAACATCGGAAGTA |
| | | | ACATCGGAATTAATTATGTATACTGGTACCAGCAGCTCCCAGGAACG |
| | | | GCCCCCAAACTCCTCATCTACAGTACTAATCAGCGGCCCTCAGGGGTC |
| | | | CCTGACCGATTCTCTGGCTCCCAGTCTGGCACCTCAGCCTCCCTGGCC |
| | | | ATCAGTGGGCTCCGGTCCGAGGATGAGGCTGATTATTACTGTGCAGC |
| | | | ATGGGATGACAGCCTGAGTGGTCCGGTGTTCGGCGGAGGGACCAAGC |
| | | | TCACCGTCCTA |
| 119 | 1898 | 1898 | SYELTQPPSASGTPGQRVTISCSGSSSNIGSNIGINYVYWYQQLPGTAPKL |
| | | | LIYSTNQRPSGVPDRFSGSQSGTSASLAISGLRSEDEADYYCAAWDDSLS |
| | | | GPVFGGGTKLTVL |
| 119 | 1899 | 1899 | SGSSSNIGSNIGINYVY |
| 119 | 1900 | 1900 | TCTGGAAGCAGCTCCAACATCGGAAGTAACATCGGAATTAATTATGT |
| | | | ATAC |
| 119 | 1901 | 1901 | STNQRPS |
| 119 | 1902 | 1902 | AGTACTAATCAGCGGCCCTCA |
| 119 | 1903 | 1903 | AAWDDSLSGPV |
| 119 | 1904 | 1904 | GCAGCATGGGATGACAGCCTGAGTGGTCCGGTG |
| 120 | 1905 | 1905 | CAGGTGCAGCTGGTGCAGTCTGGACCAGAGTTGAAAAAGCCCGGGGA |
| | | | GTCTCTGAAGATCTCCTGTAAGGCTTCTGGATACAGCTTTACCTCCTT |
| | | | CTGGATCGCTTGGGTGCGCCAGATGCCCGGGAAAGGCCTGGAGTTTC |
| | | | TGGGGATCATCTATCCTGGTGACGCTGACACCAGATACAGTCCGTCCT |
| | | | TCCAAGGCCAAGTCACCATCTCAGCCGACAAGTCCATCAACACCGCC |
| | | | TACCTGCAGTGGAACAACCTGAAGGCCTCGGACACCGCCATGTATTA |
| | | | CTGTGCGAGACAGACTACGATGACCCCCGATGCTTTTGATCTCTGGGG |
| | | | CCAAGGGACCACGGTCACCGTCTCCTCA |
| 120 | 1906 | 1906 | QVQLVQSGPELKKPGESLKISCKASGYSFTSFWIAWVRQMPGKGLEFLGI |
| | | | IYPGDADTRYSPSFQGQVTISADKSINTAYLQWNNLKASDTAMYYCARQ |
| | | | TTMTPDAFDLWGQGTTVTVSS |
| 120 | 1907 | 1907 | YSFTSFWIA |
| 120 | 1908 | 1908 | TACAGCTTTACCTCCTTCTGGATCGCT |
| 120 | 1909 | 1909 | IIYPGDADTRYSPSFQG |
| 120 | 1910 | 1910 | ATCATCTATCCTGGTGACGCTGACACCAGATACAGTCCGTCCTTCCAA |
| | | | GGC |
| 120 | 1911 | 1911 | ARQTTMTPDAFDL |
| 120 | 1912 | 1912 | GCGAGACAGACTACGATGACCCCCGATGCTTTTGATCTC |
| 120 | 1913 | 1913 | GAAATTGTGTTGACACAGTCTCCAGCCACCCTGTCTTTGTCTCCAGGG |
| | | | GAAAGAGCCACTATCTCCTGCAGGGCCAGTCAGAGTGTTAGCAGCTA |
| | | | CTTAGCCTGGTACCAACAGAAACCTGGCCAGGCTCCCAGGCTCCTCA |
| | | | TCTATGAAGCATCCGACAGGGCCACTGGCACCCCAGCCAGGTTCAGT |
| | | | GGCAGTGGGTCTGGGACAGACTTCACTCTCACCATCAGCAGCCTAGA |
| | | | GCCTGAGGATTTTGCAGTTTATTACTGTCAGCAGCGTAGTAACTGGGG |
| | | | GGTAGGAACGTTCGGCCAAGGGACCAAGGTGGAAATCAAA |
| 120 | 1914 | 1914 | EIVLTQSPATLSLSPGERATISCRASQSVSSYLAWYQQKPGQAPRLLIYEA |
| | | | SDRATGTPARFSGSGSGTDFTLTISSLEPEDFAVYYCQQRSNWGVGTFGQ |
| | | | GTKVEIK |
| 120 | 1915 | 1915 | RASQSVSSYLA |
| 120 | 1916 | 1916 | AGGGCCAGTCAGAGTGTTAGCAGCTACTTAGCC |
| 120 | 1917 | 1917 | EASDRAT |
| 120 | 1918 | 1918 | GAAGCATCCGACAGGGCCACT |
| 120 | 1919 | 1919 | QQRSNWGVGT |
| 120 | 1920 | 1920 | CAGCAGCGTAGTAACTGGGGGGTAGGAACG |
| 121 | 1921 | 1921 | CAGGTGCAGCTGGTGCAGTCTGGGGCTGAGGTGAAGAAGCCTGGGTC |
| | | | CTCGGTGAGGGTCACCTGCAAGGCTTCTGGAGGCACCGTCAGCGACT |
| | | | ATGCAATCACCTGGGTCCGACAGGCGCCTGGACAAGGGCTTGAGTGG |
| | | | ATGGGAGGGTTCATCCCTATGTTTGGTGTCGCAAAGGACGCAGAGAA |
| | | | GTTCCAGGGCAGAGTCACGCTGACTGGGGACAAATCCACGAACGCAG |
| | | | TTTACATGGAGCTGAGCAGCCTGACATCTGAAGACACGGCCGTCTAT |
| | | | TACTGTGCGAGATCGAAGAGACTACCAGCTGGTTTATCTACGTCTGAC |
| | | | TACTACTACTACTATTTGGACGTCTGGGGCAAAGGGACCACGGTCAC |
| | | | CGTCTCCTCA |
| 121 | 1922 | 1922 | QVQLVQSGAEVKKPGSSVRVTCKASGGTVSDYAITWVRQAPGQGLEW |
| | | | MGGFIPMFGVAKDAEKFQGRVTLTGDKSTNAVYMELSSLTSEDTAVYY |
| | | | CARSKRLPAGLSTSDYYYYYLDVWGKGTTVTVSS |
| 121 | 1923 | 1923 | GTVSDYAIT |
| 121 | 1924 | 1924 | GGCACCGTCAGCGACTATGCAATCACC |
| 121 | 1925 | 1925 | GFIPMFGVAKDAEKFQG |
| 121 | 1926 | 1926 | GGGTTCATCCCTATGTTTGGTGTCGCAAAGGACGCAGAGAAGTTCCA |
| | | | GGGC |
| 121 | 1927 | 1927 | ARSKRLPAGLSTSDYYYYYLDV |
| 121 | 1928 | 1928 | GCGAGATCGAAGAGACTACCAGCTGGTTTATCTACGTCTGACTACTA |
| | | | CTACTACTATTTGGACGTC |
| 121 | 1929 | 1929 | GAAATTGTATTGACACAGTCTCCAGGCACCCTGTCTTTGTCTCCAGGG |
| | | | GAAGGAGCCACCCTCTCCTGTACGGCCAGTCAGAATGTTTTCCGCACC |
| | | | CACGTAGCCTGGTACCAGCAGACTCCTGGCCAGGCTCCCAGGCTCCT |
| | | | CATCTATGGTGGGTCCACCAGGGCCACTGGCATCCCAGACAGGTTCA |
| | | | GTGGCAGCGGGTCTGGGACAGACTTCACTCTCATCATCAGCAGACTG |
| | | | GAACCTGAAGATTTTGCAGTCTATTACTGTCATCACTTTGGTACCACA |
| | | | CCGTGGACGTTCGGCCAAGGGACCAAGGTGGAGATCAAA |
| 121 | 1930 | 1930 | EIVLTQSPGTLSLSPGEGATLSCTASQNVFRTHVAWYQQTPGQAPRLLIY |
| | | | GGSTRATGIPDRFSGSGSGTDFTLIISRLEPEDFAVYYCHHFGTTPWTFGQ |
| | | | GTKVEIK |
| 121 | 1931 | 1931 | TASQNVFRTHVA |
| 121 | 1932 | 1932 | ACGGCCAGTCAGAATGTTTTCCGCACCCACGTAGCC |
| 121 | 1933 | 1933 | GGSTRAT |
| 121 | 1934 | 1934 | GGTGGGTCCACCAGGGCCACT |
| 121 | 1935 | 1935 | HHFGTTPWT |
| 121 | 1936 | 1936 | CATCACTTTGGTACCACACCGTGGACG |
| 122 | 1937 | 1937 | GAGGTGCAGCTGGTGGAGTCTGGGCCTGAGGTGAAGGGGCCTGGGTC |
| | | | CTCGGTGAAAGTCTCATGCGAGGCTTCTGCAGCCACCTTCAGCAACTA |
| | | | CGCTATCAGCTGGGTCCGACAGGCCCCTGGACAAGGGCTTGAGTGGA |
| | | | TGGGAGGGTTCGTCCCTATGTTAGGGACAAGGAACTACGCACAGAAG |
| | | | TTCAAGGGCAGAGTCACTCTGACCGCGGACGTATCCACACATACATT |
| | | | GTACTTGGAGATTGGTAGTCTGAGATTTGAGGACACGGCCGTGTATTA |
| | | | CTGTGCGACAGTGGCCGGTCTGGGAACCAGCTATGGTCGATACCTTG |
| | | | AGTCTTGGGGCCAGGGAACCCTGGTCACCGTCTCCTCA |
| 122 | 1938 | 1938 | EVQLVESGPEVKGPGSSVKVSCEASAATFSNYAISWVRQAPGQGLEWM |
| | | | GGFVPMLGTRNYAQKFKGRVTLTADVSTHTLYLEIGSLRFEDTAVYYCA |
| | | | TVAGLGTSYGRYLESWGQGTLVTVSS |
| 122 | 1939 | 1939 | ATFSNYAIS |
| 122 | 1940 | 1940 | GCCACCTTCAGCAACTACGCTATCAGC |
| 122 | 1941 | 1941 | GFVPMLGTRNYAQKFKG |
| 122 | 1942 | 1942 | GGGTTCGTCCCTATGTTAGGGACAAGGAACTACGCACAGAAGTTCAA |
| | | | GGGC |
| 122 | 1943 | 1943 | ATVAGLGTSYGRYLES |
| 122 | 1944 | 1944 | GCGACAGTGGCCGGTCTGGGAACCAGCTATGGTCGATACCTTGAGTCT |
| 122 | 1945 | 1945 | GACATCCGGATGACCCAGTCTCCATCTTCTGTGTCTGCGTCTCTTGGA |
| | | | GACAGAGTCACCATCACTTGTCGGGCGAGTCAGGATATTAGCACCGC |
| | | | GTTAGCCTGGTATCAGCAGATACCAGGGAAGGCCCCTAAACTCCTGA |
| | | | TCTATGAAGCATCCAGTTTGCAAAGTGGGGTCCCATCCAGGTTCAGG |
| | | | GGCAGTGGATCTGAGACAGACTTCGCTCTCACTATCAGCAGCCTGCA |
| | | | GCCTGAAGATTTTGCAACTTACTATTGTCAACAGGCAAAGAGTTTCCC |
| | | | GTACACTTTTGGCCAGGGGACCAAGGTGGAGATCAAA |
| 122 | 1946 | 1946 | DIRMTQSPSSVSASLGDRVTITCRASQDISTALAWYQQIPGKAPKLLIYEA |
| | | | SSLQSGVPSRFRGSGSETDFALTISSLQPEDFATYYCQQAKSFPYTFGQGT |
| | | | KVEIK |
| 122 | 1947 | 1947 | RASQDISTALA |
| 122 | 1948 | 1948 | CGGGCGAGTCAGGATATTAGCACCGCGTTAGCC |
| 122 | 1949 | 1949 | EASSLQS |
| 122 | 1950 | 1950 | GAAGCATCCAGTTTGCAAAGT |
| 122 | 1951 | 1951 | QQAKSFPYT |
| 122 | 1952 | 1952 | CAACAGGCAAAGAGTTTCCCGTACACT |
| 123 | 1953 | 1953 | CAGGTCCAGCTGGTGCAGTCTGGGGGAGGCTTGGCGCAGCCTGGAGG |
| | | | GTCCCTGAGACTCTCCTGTGCAGCCTCCGGATTCATCTTCAGTGTTTA |
| | | | TGAAATGGACTGGGTCCGCCAGGCTCCAGGGAAGGGGCTGGAGTGGC |
| | | | TTTCATACATTGATATTACTGGTAATAGTGTAACCTATGCAGACTCTG |
| | | | TGAGGGGCCGGTTCACCATCTCCAGAGACAACGCCAGGAACTCACTC |
| | | | TACCTGCAAATGGACAGCCTGAGAGTCGAGGACACGGCTGTATATTA |
| | | | TTGTGTTAGAGATAGTCGCGGCCCTACAACGCAGTGGCTCACGGGAT |
| | | | ACTTTGACTTCTGGGGCCAGGGGACCACGGTCACCGTCTCCTCA |
| 123 | 1954 | 1954 | QVQLVQSGGGLAQPGGSLRLSCAASGFIFSVYEMDWVRQAPGKGLEWL |
| | | | SYIDITGNSVTYADSVRGRFTISRDNARNSLYLQMDSLRVEDTAVYYCV |
| | | | RDSRGPTTQWLTGYFDFWGQGTTVTVSS |
| 123 | 1955 | 1955 | FIFSVYEMD |
| 123 | 1956 | 1956 | TTCATCTTCAGTGTTTATGAAATGGAC |
| 123 | 1957 | 1957 | YIDITGNSVTYADSVRG |
| 123 | 1958 | 1958 | TACATTGATATTACTGGTAATAGTGTAACCTATGCAGACTCTGTGAGG |
| | | | GGC |
| 123 | 1959 | 1959 | VRDSRGPTTQWLTGYFDF |
| 123 | 1960 | 1960 | GTTAGAGATAGTCGCGGCCCTACAACGCAGTGGCTCACGGGATACTT |
| | | | TGACTTC |
| 123 | 1961 | 1961 | GACATCCGGATGACCCAGTCTCCAGCCACCCTGTCTTTGTCTCCAGGG |
| | | | GAAAGAGCCACCCTCTCCTGCAGGGCCAGTCAGAGTGTTAGCAACTA |
| | | | CTTAGCCTGGTACCAACAGAAACCTGGCCAGGCTCCCAGGCTCCTCA |
| | | | TCTATGATGTATCCAATAGGGCCACTGGCATCCCAGCCAGGTTCAGTG |
| | | | GCAGTGGGTCCGGGACAGACTTCACTCTCACCATCAGCAGCCTGGAG |
| | | | CCTGAAGATTTTGCAGTTTATTACTGTCAGCAGCGTCGCAACTGGCCT |
| | | | CCGCTCACTTTCGGCGGAGGGACCAAGGTGGAGGTCAAA |
| 123 | 1962 | 1962 | DIRMTQSPATLSLSPGERATLSCRASQSVSNYLAWYQQKPGQAPRLLIYD |
| | | | VSNRATGIPARFSGSGSGTDFTLTISSLEPEDFAVYYCQQRRNWPPLTFGG |
| | | | GTKVEVK |
| 123 | 1963 | 1963 | RASQSVSNYLA |
| 123 | 1964 | 1964 | AGGGCCAGTCAGAGTGTTAGCAACTACTTAGCC |
| 123 | 1965 | 1965 | DVSNRAT |
| 123 | 1966 | 1966 | GATGTATCCAATAGGGCCACT |
| 123 | 1967 | 1967 | QQRRNWPPLT |
| 123 | 1968 | 1968 | CAGCAGCGTCGCAACTGGCCTCCGCTCACT |

### ADDITIONAL EMBODIMENTS

### Embodiment 1

[0312] An isolated antibody or an antigen-binding fragment thereof that specifically binds to Respiratory Syncytial Virus (RSV) F protein (F), wherein at least one of the CDRH1, a CDRH2, a CDRH3, a CDRL1, a CDRL2, and CDRL3 amino acid sequence of the antibody or the antigen-binding fragment thereof is at least 70% identical; at least 75% identical; 80% identical; at least 85% identical; at least 90% identical; at least 95% identical; at least 96% identical; at least 97% identical; at least 98% identical; at least 99%; and/or all percentages of identity in between; to at least one of the CDRH1, a CDRH2, a CDRH3, a CDRL1, a CDRL2, and/or a CDRL3 amino acid sequences as disclosed in Table 6 of an antibody selected from Antibody Number 1 through Antibody Number 123 as disclosed in Table 6; and wherein said antibody or the antigen-binding fragment thereof also has one or more of the following characteristics:

[0313] a) the antibody or antigen-binding fragment thereof cross-competes with said antibody or antigen-binding fragment thereof for binding to RSV-F;

[0314] b) the antibody or antigen-binding fragment thereof displays better binding affinity for the PreF form of RSV-F relative to the PostF form;

[0315] c) the antibody or antigen-binding fragment thereof displays a clean or low polyreactivity profile;

[0316] d) the antibody or antigen-binding fragment thereof displays neutralization activity toward RSV subtype A and RSV subtype B in vitro;

[0317] e) the antibody or antigen-binding fragment thereof displays antigenic site specificity for RSV-F at Site ø, Site I, Site II, Site III, Site IV, or Site V;

[0318] f) the antibody or antigen-binding fragment thereof displays antigenic site specificity for RSV-F Site ø, Site V, or Site III relative to RSV-F Site I, Site II, or Site IV;

[0319] g) at least a portion of the epitope with which the antibody or antigen-binding fragment thereof interacts comprises the α3 helix and β3/β4 hairpin of PreF;

[0320] h) the antibody or antigen-binding fragment thereof displays an in vitro neutralization potency (IC₅₀) of between about 0.5 microgram/milliliter (ug/ml) to about 5 ug/ml; between about 0.05 ug/ml to about 0.5 ug/ml; or less than about 0.05 mg/ml;

[0321] i) the binding affinity and/or epitopic specificity of the antibody or antigen-binding fragment thereof for any one of the RSV-F variants designated as 1, 2, 3, 4, 5, 6, 7, 8, 9, and DG in FIG. 7A is reduced or eliminated relative to the binding affinity and/or epitopic specificity of said antibody or antigen-binding fragment thereof for the RSV-F or RSV-F DS-Cav1;

[0322] j) the antibody or antigen-binding fragment thereof of displays a cross-neutralization potency (IC₅₀) against human metapneumovirus (HMPV);

[0323] k) the antibody or antigen-binding fragment thereof does not complete with D25, MPE8, palivisumab, motavizumab, or AM-14; or

[0324] l) the antibody or antigen-binding fragment thereof displays at least about 2-fold; at least about 3-fold; at least about 4-fold; at least about 5-fold; at least about 6-fold; at least about 7-fold; at least about 8-fold; at least about 9-fold; at least about 10-fold; at least about 15-fold; at least about 20-fold; at least about 25-fold; at least about 30-fold; at least about 35-fold; at least about 40-fold; at least about 50-fold; at least about 55-fold; at least about 60-fold; at least about 70-fold; at least about 80-fold; at least about 90-fold; at least about 100-fold; greater than about 100-fold; and folds in between any of the foregoing; greater neutralization potency (IC50) than D25 and/or palivizumab.

### Embodiment 2

[0325] The isolated antibody or antigen-binding fragment thereof of Embodiment 1, wherein the antibody or antigen-binding fragment thereof comprises: at least two; at least three; at least 4; at least 5; at least 6; at least 7; at least 8; at least 9; at least 10; at least 11; or at least 12; of characteristics a) through 1).

### Embodiment 3

[0326] The isolated antibody or antigen-binding fragment thereof of Embodiment 1 or 2, wherein the antibody or antigen-binding fragment thereof comprises:

[0327] a) the CDRH3 amino acid sequence of any one of the antibodies designated Antibody Number 1 through Antibody Number 123 as disclosed in Table 6;

[0328] b) the CDRH2 amino acid sequence of any one of the antibodies designated Antibody Number 1 through Antibody Number 123 as disclosed in Table 6;

[0329] c) the CDRH1 amino acid sequence of any one of the antibodies designated Antibody Number 1 through Antibody Number 123 as disclosed in Table 6;

[0330] d) the CDRL3 amino acid sequence of any one of the antibodies designated Antibody Number 1 through Antibody Number 123 as disclosed in Table 6;

[0331] e) the CDRL2 amino acid sequence of any one of the antibodies designated Antibody Number 1 through Antibody Number 123 as disclosed in Table 6;

[0332] f) the CDRL1 amino acid sequence of any one of the antibodies designated Antibody Number 1 through Antibody Number 123 as disclosed in Table 6; or

[0333] g) any combination of two or more of a), b), c), d), e), and f).

### Embodiment 4

[0334] The isolated antibody or antigen-binding fragment thereof of any one of Embodiments 1 through 3, wherein the antibody or antigen-binding fragment thereof comprises:

[0335] a) a heavy chain (HC) amino acid sequence of any one of the antibodies designated Antibody Number 1 through Antibody Number 123 as disclosed in Table 6; and/or

[0336] b) a light chain (LC) amino acid sequence of any one of the antibodies designated Antibody Number 1 through Antibody Number 123 as disclosed in Table 6.

### Embodiment 5

[0337] The isolated antibody or antigen-binding fragment thereof of any one of Embodiments 1 through 4, wherein the antibody is selected from the group consisting antibodies that are at least 70% identical; at least 75% identical; 80% identical; at least 85% identical; at least 90% identical; at least 95% identical; at least 96% identical; at least 97% identical; at least 98% identical; at least 99%; and/or all percentages of identity in between; to any one of the antibodies designated as Antibody Number 1 through Antibody Number 123 as disclosed in Table 6.

### Embodiment 6

[0338] The isolated antibody or antigen-binding fragment thereof of any one of Embodiments 1 through 5, wherein the antibody is selected from the group consisting of the antibodies designated as Antibody 1 through Antibody Number 123 as disclosed in Table 6.

### Embodiment 7

[0339] An isolated nucleic acid sequence encoding an antibody or antigen-binding fragment thereof according to any one of Embodiments 1 through 6.

### Embodiment 8

[0340] An expression vector comprising the isolated nucleic acid sequence according to Embodiment 7.

### Embodiment 9

[0341] A host cell transfected, transformed, or transduced with the nucleic acid sequence according to Embodiment 7 or the expression vector according to Embodiment 8.

### Embodiment 10

[0342] A pharmaceutical composition comprising: one or more of the isolated antibodies or antigen-binding fragments thereof according to any one of Embodiments 1 through 6; and a pharmaceutically acceptable carrier and/or excipient.

### Embodiment 11

[0343] A pharmaceutical composition comprising: one or more nucleic acid sequences according to Embodiment 7; or one or more the expression vectors according to Embodiment 8; and a pharmaceutically acceptable carrier and/or excipient.

### Embodiment 12

[0344] A transgenic organism comprising the nucleic acid sequence according to Embodiment 7; or the expression vector according to Embodiment 8.

### Embodiment 13

[0345] A method of treating or preventing a Respiratory Syncytial Virus (RSV) infection, or at least one symptom associated with RSV infection, comprising administering to a patient in need thereof or suspected of being in need thereof:

[0346] a) one or more antibodies or antigen-binding fragments thereof according to any of Embodiments 1 through 6;

[0347] b) a nucleic acid sequences according to Embodiment 7;

[0348] c) an expression vector according to Embodiment 8;

[0349] d) a host cell according to Embodiment 9; or

[0350] e) a pharmaceutical composition according Embodiment 10 or Embodiment 11;

such that the RSV infection is treated or prevented, or the at least on symptom associated with RSV infection is treated, alleviated, or reduced in severity.

### Embodiment 14

[0351] A method of treating or preventing either a Respiratory Syncytial Virus (RSV) infection or a human metapneumovirus (HMPV) infection, or at least one symptom associated with said RSV infection or said HMPV infection, comprising administering to a patient in need thereof or suspected of being in need thereof:

[0352] a) one or more antibodies or antigen-binding fragments thereof according to any of Embodiments 1 through 6;

[0353] b) a nucleic acid sequences according to Embodiment 7;

[0354] c) an expression vector according to Embodiment 8;

[0355] d) a host cell according to Embodiment 9; or

[0356] e) a pharmaceutical composition according Embodiment 10 or Embodiment 11;

such that the RSV infection is treated or prevented, or the at least on symptom associated with RSV infection is treated, alleviated, or reduced in severity.

### Embodiment 15

[0357] The method according to Embodiment 14, wherein the one or more antibodies or antigen-binding fragments thereof of a) is selected from the group consisting of the antibodies designated as Antibody Number 4, 11, or 62 as disclosed in Table 6.

### Embodiment 16

[0358] The method according to any one of Embodiments 13 through 15, wherein the method further comprises administering to the patient a second therapeutic agent.

### Embodiment 17

[0359] The method according to Embodiment 16, wherein the second therapeutic agent is selected from the group consisting of: an antiviral agent; a vaccine specific for RSV, a vaccine specific for influenza virus, or a vaccine specific for metapneumovirus (MPV); an siRNA specific for an RSV antigen or a metapneumovirus (MPV) antigen; a second antibody specific for an RSV antigen or a metapneumovirus (MPV) antigen; an anti-IL4R antibody, an antibody specific for an influenza virus antigen, an anti-RSV-G antibody and a NSAID.

### Embodiment 18

[0360] A pharmaceutical composition comprising any one or more of the isolated antibodies or antigen-binding fragments thereof of any one of Embodiments 1 through 7 and a pharmaceutically acceptable carrier and/or excipient.

### Embodiment 19

[0361] The pharmaceutical composition according to Embodiment 18 for use in preventing a respiratory syncytial virus (RSV) infection in a patient in need thereof or suspected of being in need thereof, or for treating a patient suffering from an RSV infection, or for ameliorating at least one symptom or complication associated with the infection, wherein the infection is either prevented, or at least one symptom or complication associated with the infection is prevented, ameliorated, or lessened in severity and/or duration as a result of such use.

### Embodiment 20

[0362] The pharmaceutical composition according to Embodiment 18 for use in treating or preventing either a Respiratory Syncytial Virus (RSV) infection or a human metapneumovirus (HMPV) infection, or at least one symptom associated with said RSV infection or said HMPV infection, in a patient in need thereof or suspected of being in need thereof, wherein the infection is either prevented, or at least one symptom or complication associated with the infection is prevented, ameliorated, or lessened in severity and/or duration as a result of such use.

### Embodiment 21

[0363] Use of the pharmaceutical composition of Embodiment 18 in the manufacture of a medicament for preventing a respiratory syncytial virus (RSV) infection in a patient in need thereof, or for treating a patient suffering from an RSV infection, or for ameliorating at least one symptom or complication associated with the infection, wherein the infection is either prevented, or at least one symptom or complication associated with the infection is prevented, ameliorated, or lessened in severity and/or duration.

### Embodiment 22

[0364] Use of the pharmaceutical composition of Embodiment 18 in the manufacture of a medicament for preventing either a Respiratory Syncytial Virus (RSV) infection or a human metapneumovirus (HMPV) infection, or at least one symptom associated with said RSV infection or said HMPV infection, in a patient in need thereof or suspected of being in need thereof, wherein the infection is either prevented, or at least one symptom or complication associated with the infection is prevented, ameliorated, or lessened in severity and/or duration as a result of such use.

### Embodiment A1

[0365] An isolated antibody or an antigen-binding fragment thereof that specifically binds to Respiratory Syncytial Virus (RSV) F protein (F), wherein at least one, at least two of, at least three of, at least four of, at least five of, or six of the CDRH1, a CDRH2, a CDRH3, a CDRL1, a CDRL2, and CDRL3 amino acid sequence of the antibody or the antigen-binding fragment thereof is at least 70% identical; at least 75% identical; 80% identical; at least 85% identical; at least 90% identical; at least 95% identical; at least 96% identical; at least 97% identical; at least 98% identical; at least 99%; at least 100% and/or all percentages of identity in between; to at least one of, at least two of, at least three of, at least four of, at least five of, or six of the CDRH1, a CDRH2, a CDRH3, a CDRL1, a CDRL2, and/or a CDRL3 amino acid sequences as disclosed in Table 6 of an antibody selected from Antibody Number 1 through Antibody Number 123 as disclosed in Table 6; and wherein said antibody or the antigen-binding fragment thereof also has one or more of the following characteristics:

[0366] a) the antibody or antigen-binding fragment thereof cross-competes with said antibody or antigen-binding fragment thereof for binding to RSV-F;

[0367] b) the antibody or antigen-binding fragment thereof displays better binding affinity for the PreF form of RSV-F relative to the PostF form;

[0368] c) the antibody or antigen-binding fragment thereof displays a clean or low polyreactivity profile;

[0369] d) the antibody or antigen-binding fragment thereof displays neutralization activity toward RSV subtype A and RSV subtype B in vitro;

[0370] e) the antibody or antigen-binding fragment thereof displays antigenic site specificity for RSV-F at Site ø, Site I, Site II, Site III, Site IV, or Site V;

[0371] f) the antibody or antigen-binding fragment thereof displays antigenic site specificity for RSV-F Site ø, Site V, or Site III relative to RSV-F Site I, Site II, or Site IV;

[0372] g) at least a portion of the epitope with which the antibody or antigen-binding fragment thereof interacts comprises the α3 helix and β3/β4 hairpin of PreF;

[0373] h) the antibody or antigen-binding fragment thereof displays an in vitro neutralization potency (IC₅₀) of between about 0.5 microgram/milliliter (μg/ml) to about 5 μg/ml; between about 0.05 μg/ml to about 0.5 μg/ml; or less than about 0.05 mg/ml;

[0374] i) the binding affinity and/or epitopic specificity of the antibody or antigen-binding fragment thereof for any one of the RSV-F variants designated as 1, 2, 3, 4, 5, 6, 7, 8, 9, and DG in FIG. 7A is reduced or eliminated relative to the binding affinity and/or epitopic specificity of said antibody or antigen-binding fragment thereof for the RSV-F or RSV-F DS-Cav1;

[0375] j) the antibody or antigen-binding fragment thereof of displays a cross-neutralization potency (IC₅₀) against human metapneumovirus (HMPV);

[0376] k) the antibody or antigen-binding fragment thereof does not complete with D25, MPE8, palivisumab, motavizumab, or AM-14; or

[0377] l) the antibody or antigen-binding fragment thereof displays at least about 2-fold; at least about 3-fold; at least about 4-fold; at least about 5-fold; at least about 6-fold; at least about 7-fold; at least about 8-fold; at least about 9-fold; at least about 10-fold; at least about 15-fold; at least about 20-fold; at least about 25-fold; at least about 30-fold; at least about 35-fold; at least about 40-fold; at least about 50-fold; at least about 55-fold; at least about 60-fold; at least about 70-fold; at least about 80-fold; at least about 90-fold; at least about 100-fold; greater than about 100-fold; and folds in between any of the foregoing; greater neutralization potency (IC₅₀) than D25 and/or palivizumab.

### Embodiment A2

[0378] The isolated antibody or antigen-binding fragment thereof of Embodiment A1, wherein the antibody or antigen-binding fragment thereof comprises: at least two; at least three; at least 4; at least 5; at least 6; at least 7; at least 8; at least 9; at least 10; at least 11; or at least 12; of characteristics a) through 1).

### Embodiment A3

[0379] The isolated antibody or antigen-binding fragment thereof of Embodiment A1 or A2, wherein the antibody or antigen-binding fragment thereof comprises:

[0380] a) the CDRH3 amino acid sequence of any one of the antibodies designated Antibody Number 1 through Antibody Number 123 as disclosed in Table 6;

[0381] b) the CDRH2 amino acid sequence of any one of the antibodies designated Antibody Number 1 through Antibody Number 123 as disclosed in Table 6;

[0382] c) the CDRH1 amino acid sequence of any one of the antibodies designated Antibody Number 1 through Antibody Number 123 as disclosed in Table 6;

[0383] d) the CDRL3 amino acid sequence of any one of the antibodies designated Antibody Number 1 through Antibody Number 123 as disclosed in Table 6;

[0384] e) the CDRL2 amino acid sequence of any one of the antibodies designated Antibody Number 1 through Antibody Number 123 as disclosed in Table 6;

[0385] f) the CDRL1 amino acid sequence of any one of the antibodies designated Antibody Number 1 through Antibody Number 123 as disclosed in Table 6; or

[0386] g) any combination of two or more of a), b), c), d), e), and f).

### Embodiment A4

[0387] The isolated antibody or antigen-binding fragment thereof of any one of Embodiments A1 through A3, wherein the antibody or antigen-binding fragment thereof comprises:

[0388] a) a heavy chain (HC) amino acid sequence of any one of the antibodies designated Antibody Number 1 through Antibody Number 123 as disclosed in Table 6; and/or

[0389] b) a light chain (LC) amino acid sequence of any one of the antibodies designated Antibody Number 1 through Antibody Number 123 as disclosed in Table 6.

### Embodiment A5

[0390] The isolated antibody or antigen-binding fragment thereof of any one of Embodiments 1 through 4, wherein the antibody is selected from the group consisting antibodies that are at least 70% identical; at least 75% identical; 80% identical; at least 85% identical; at least 90% identical; at least 95% identical; at least 96% identical; at least 97% identical; at least 98% identical; at least 99%; and/or all percentages of identity in between; to any one of the antibodies designated as Antibody Number 1 through Antibody Number 123 as disclosed in Table 6.

### Embodiment A6

[0391] The isolated antibody or antigen-binding fragment thereof of any one of Embodiments A1 through A5, wherein the antibody is selected from the group consisting of the antibodies designated as Antibody 1 through Antibody Number 123 as disclosed in Table 6.

### Embodiment A7

[0392] An isolated nucleic acid sequence encoding an antibody or antigen-binding fragment thereof according to any one of Embodiments A1 through A6.

### Embodiment A8

[0393] An expression vector comprising the isolated nucleic acid sequence according to Embodiment A7.

### Embodiment A9

[0394] A host cell transfected, transformed, or transduced with the nucleic acid sequence according to Embodiment A7 or the expression vector according to Embodiment A8.

### Embodiment A10

[0395] A pharmaceutical composition comprising: one or more of the isolated antibodies or antigen-binding fragments thereof according to any one of Embodiments A1 through A6; and a pharmaceutically acceptable carrier and/or excipient.

### Embodiment A11

[0396] A pharmaceutical composition comprising: one or more nucleic acid sequences according to Embodiment A7; or one or more the expression vectors according to Embodiment A8; and a pharmaceutically acceptable carrier and/or excipient.

### Embodiment A12

[0397] A pharmaceutical composition comprising a first nucleic acid sequence encoding the light chain of an antibody or antigen-binding fragment according to any one of Embodiments A1 through A6 and a second nucleic acid sequence encoding the heavy chain of an antibody or antigen binding fragment according to any one of Embodiments A1 through A6.

### Embodiment A13

[0398] A first pharmaceutical composition comprising a first nucleic acid sequence encoding the light chain of an antibody or antigen-binding fragment according to any one of Embodiments A1 through A6 and a second pharmaceutical composition comprising a second nucleic acid sequence encoding the heavy chain of an antibody or antigen binding fragment according to any one of Embodiments A1 through A6, wherein upon coadministration of the first and second pharmaceutical compositions to the subject, an antibody of the invention or antigen binding fragment thereof is expressed in the subject.

### Embodiment A14

[0399] A transgenic organism comprising the nucleic acid sequence according to Embodiment A7 or the expression vector according to Embodiment A8.

### Embodiment A15

[0400] A method of treating or preventing a Respiratory Syncytial Virus (RSV) infection, or at least one symptom associated with RSV infection, comprising administering to a patient in need thereof or suspected of being in need thereof:

[0401] a) one or more antibodies or antigen-binding fragments thereof according to any of Embodiments A1 through A6;

[0402] b) a nucleic acid sequences according to Embodiment A7;

[0403] c) an expression vector according to Embodiment A8;

[0404] d) a host cell according to Embodiment A9; or

[0405] e) a pharmaceutical composition according to any one of Embodiment A10 through Embodiment A13, such that the RSV infection is treated or prevented, or the at least on symptom associated with RSV infection is treated, alleviated, or reduced in severity.

### Embodiment A16

[0406] A method of treating or preventing either a Respiratory Syncytial Virus (RSV) infection and/or a human metapneumovirus (HMPV) infection, or at least one symptom associated with said RSV infection and/or said HMPV infection, comprising administering to a patient in need thereof or suspected of being in need thereof:

[0407] a) one or more antibodies or antigen-binding fragments thereof according to any of Embodiments A1 through A6;

[0408] b) a nucleic acid sequences according to Embodiment A7;

[0409] c) an expression vector according to Embodiment A8;

[0410] d) a host cell according to Embodiment A9; or

[0411] e) a pharmaceutical composition according to any one of Embodiment A10 through Embodiment A13, such that the RSV infection and/or HMPV infection is treated or prevented, or the at least on symptom associated with RSV infection and/or HMPV infection is treated, alleviated, or reduced in severity.

### Embodiment A17

[0412] The method according to Embodiment A16, wherein the one or more antibodies or antigen-binding fragments thereof of a) is selected from the group consisting of the antibodies designated as Antibody Number 4, 11, or 62 as disclosed in Table 6.

### Embodiment A18

[0413] The method according to any one of Embodiments A15 through A17, wherein the method further comprises administering to the patient a second therapeutic agent.

### Embodiment A19

[0414] The method according to Embodiment A18, wherein the second therapeutic agent is selected group consisting of: an antiviral agent; a vaccine specific for RSV, a vaccine specific for influenza virus, or a vaccine specific for metapneumovirus (MPV); an siRNA specific for an RSV antigen or a metapneumovirus (MPV) antigen; a second antibody specific for an RSV antigen or a metapneumovirus (MPV) antigen; an anti-IL4R antibody, an antibody specific for an influenza virus antigen, an anti-RSV-G antibody and a NSAID.

### Embodiment A20

[0415] A pharmaceutical composition comprising any one or more of the isolated antibodies or antigen-binding fragments thereof or a nucleic acid molecule encoding said isolated antibody or antigen-binding fragment thereof of any one of Embodiments A1 through A7 and a pharmaceutically acceptable carrier and/or excipient.

### Embodiment A21

[0416] The pharmaceutical composition according to Embodiment A20 for use in preventing a respiratory syncytial virus (RSV) infection in a patient in need thereof or suspected of being in need thereof, or for treating a patient suffering from an RSV infection, or for ameliorating at least one symptom or complication associated with the infection, wherein the infection is either prevented, or at least one symptom or complication associated with the infection is prevented, ameliorated, or lessened in severity and/or duration as a result of such use.

### Embodiment A22

[0417] The pharmaceutical composition according to Embodiment A20 for use in treating or preventing either a Respiratory Syncytial Virus (RSV) infection and/or a human metapneumovirus (HMPV) infection, or at least one symptom associated with said RSV infection and/or said HMPV infection, in a patient in need thereof or suspected of being in need thereof, wherein the infection(s) is/are either prevented, or at least one symptom or complication associated with the infection(s) is prevented, ameliorated, or lessened in severity and/or duration as a result of such use.

### Embodiment A23

[0418] Use of the pharmaceutical composition of Embodiment 18 in the manufacture of a medicament for preventing a respiratory syncytial virus (RSV) infection in a patient in need thereof, or for treating a patient suffering from an RSV infection, or for ameliorating at least one symptom or complication associated with the infection, wherein the infection is either prevented, or at least one symptom or complication associated with the infection is prevented, ameliorated, or lessened in severity and/or duration.

### Embodiment A24

[0419] Use of the pharmaceutical composition of Embodiment A20 in the manufacture of a medicament for preventing either a Respiratory Syncytial Virus (RSV) infection and/or a human metapneumovirus (HMPV) infection, or at least one symptom associated with said RSV infection and/or said HMPV infection, in a patient in need thereof or suspected of being in need thereof, wherein the infection(s) is/are either prevented, or at least one symptom or complication associated with the infection(s) is prevented, ameliorated, or lessened in severity and/or duration as a result of such use.

What is claimed is:

1. An isolated antibody or an antigen-binding fragment thereof that specifically binds to Respiratory Syncytial Virus (RSV) F protein (F) (“anti-RSV F antibody”), wherein at least one of a CDRH1, a CDRH2, a CDRH3, a CDRL1, a CDRL2, and CDRL3 amino acid sequence of the anti-RSV F antibody is at least 70% identical; at least 75% identical; 80% identical; at least 85% identical; at least 90% identical; at least 95% identical; at least 96% identical; at least 97% identical; at least 98% identical; at least 99%; and/or all percentages of identity in between; to at least one of a CDRH1, a CDRH2, a CDRH3, a CDRL1, a CDRL2, and/or a CDRL3 amino acid sequence of an antibody selected from Antibody Number 1 through Antibody Number 123 as disclosed in Table 6; and wherein the anti-RSV F antibody has one or more of the following characteristics:
a) the anti-RSV F antibody cross-competes with an antibody selected from Antibody Number 1 through Antibody Number 123 as disclosed in Table 6 for binding to RSV-F;
b) the anti-RSV F antibody displays better binding affinity for the PreF form of RSV-F relative to the PostF form of RSV-F;
c) the anti-RSV F antibody displays a clean or low polyreactivity profile;
d) the anti-RSV F antibody displays neutralization activity toward RSV subtype A and RSV subtype B in vitro;
e) the anti-RSV F antibody displays antigenic site specificity for RSV-F at Site ø, Site I, Site II, Site III, Site IV, or Site V;
f) the anti-RSV F antibody displays antigenic site specificity for RSV-F Site ø, Site V, or Site III relative to RSV-F Site I, Site II, or Site IV;
g) at least a portion of the epitope with which the anti-RSV F antibody interacts comprises the α3 helix and β3/β4 hairpin of PreF;
h) the anti-RSV F antibody displays an in vitro neutralization potency (IC₅₀) of between about 0.5 microgram/milliliter (μg/ml) to about 5 μg/ml; between about 0.05 ug/ml to about 0.5 μg/ml; or less than about 0.05 mg/ml;
i) the binding affinity and/or epitopic specificity of the anti-RSV F antibody for any one of the RSV-F variants designated as 1, 2, 3, 4, 5, 6, 7, 8, 9, and DG in FIG. 7A is reduced or eliminated relative to the binding affinity and/or epitopic specificity of anti-RSV F antibody for RSV-F or RSV-F DS-Cav1;
j) the anti-RSV F antibody displays a cross-neutralization potency (IC₅₀) against human metapneumovirus (HMPV);
k) the anti-RSV F antibody does not complete with D25, MPE8, palivisumab, motavizumab, or AM-14; or
l) the anti-RSV F antibody displays at least about 2-fold; at least about 3-fold; at least about 4-fold; at least about 5-fold; at least about 6-fold; at least about 7-fold; at least about 8-fold; at least about 9-fold; at least about 10-fold; at least about 15-fold; at least about 20-fold; at least about 25-fold; at least about 30-fold; at least about 35-fold; at least about 40-fold; at least about 50-fold; at least about 55-fold; at least about 60-fold; at least about 70-fold; at least about 80-fold; at least about 90-fold; at least about 100-fold; greater than about 100-fold; and folds in between any of the foregoing; greater neutralization potency (IC₅₀) than D25 and/or palivizumab.

2. The isolated anti-RSV F antibody of claim 1, which comprises:
a) the CDRH3 amino acid sequence of any one of the antibodies designated Antibody Number 1 through Antibody Number 123 as disclosed in Table 6;
b) the CDRH2 amino acid sequence of any one of the antibodies designated Antibody Number 1 through Antibody Number 123 as disclosed in Table 6;
c) the CDRH1 amino acid sequence of any one of the antibodies designated Antibody Number 1 through Antibody Number 123 as disclosed in Table 6;
d) the CDRL3 amino acid sequence of any one of the antibodies designated Antibody Number 1 through Antibody Number 123 as disclosed in Table 6;
e) the CDRL2 amino acid sequence of any one of the antibodies designated Antibody Number 1 through Antibody Number 123 as disclosed in Table 6;
f) the CDRL1 amino acid sequence of any one of the antibodies designated Antibody Number 1 through Antibody Number 123 as disclosed in Table 6; or
g) any combination of two or more of a), b), c), d), e), and f).

3. The isolated anti-RSV F antibody of claim 1 or 2, which comprises:
a) a heavy chain (HC) amino acid sequence of any one of the antibodies designated Antibody Number 1 through Antibody Number 123 as disclosed in Table 6; and/or
b) a light chain (LC) amino acid sequence of any one of the antibodies designated Antibody Number 1 through Antibody Number 123 as disclosed in Table 6.

4. The isolated anti-RSV F antibody of any one of claims 1 to 3, which is selected from the group consisting antibodies that are at least 70% identical; at least 75% identical; 80% identical; at least 85% identical; at least 90% identical; at least 95% identical; at least 96% identical; at least 97% identical; at least 98% identical; at least 99% identical; or 100% identical; and/or all percentages of identity in between; to any one of the antibodies designated as Antibody Number 1 through Antibody Number 123 as disclosed in Table 6.

5. An isolated nucleic acid sequence encoding an anti-RSV F antibody according to any one of claims 1 to 5.

6. An expression vector comprising the isolated nucleic acid sequence according to claim 5.

7. A host cell transfected, transformed, or transduced with the nucleic acid sequence according to claim 5 or the expression vector according to claim 6.

8. A pharmaceutical composition comprising one or more of the anti-RSV F antibodies according to any one of claims 1 to 6; one or more nucleic acid sequences according to claim 5; or one or more expression vectors according to claim 6; and a pharmaceutically acceptable carrier and/or excipient.

9. The pharmaceutical composition according to claim 8 for use in (i) preventing a respiratory syncytial virus (RSV) infection in a patient in need thereof or suspected of being in need thereof, or for treating a patient suffering from an RSV infection, or for ameliorating at least one symptom or complication associated with the infection, wherein the infection is either prevented, or at least one symptom or complication associated with the infection is prevented, ameliorated, or lessened in severity and/or duration as a result of such use; or (ii) treating or preventing either a RSV infection or a human metapneumovirus (HMPV) infection, or at least one symptom associated with the RSV infection or the HMPV infection, in a patient in need thereof or suspected of being in need thereof, wherein the infection is either prevented, or at least one symptom or complication associated with the infection is prevented, ameliorated, or lessened in severity and/or duration as a result of such use.

10. A pharmaceutical composition comprising a first nucleic acid sequence encoding the light chain of an anti-RSV F antibody according to any one of claims 1 to 4 and a second nucleic acid sequence encoding the heavy chain of an anti-RSV F antibody according to any one of claims 1 to 4.

11. A first pharmaceutical composition comprising a first nucleic acid sequence encoding the light chain of an anti-RSV F antibody according to any one of claims 1 to 4 and a second pharmaceutical composition comprising a second nucleic acid sequence encoding the heavy chain of an anti-RSV F antibody according to any one of claims 1 to 4, wherein upon coadministration of the first and second pharmaceutical compositions to a subject, the anti-RSV F antibody is expressed in the subject.

12. A transgenic organism comprising the nucleic acid sequence according to claim 5 or the expression vector according to claim 6.

13. A method of treating or preventing a Respiratory Syncytial Virus (RSV) infection or a human metapneumovirus (HMPV) infection, or at least one symptom associated with RSV infection or HMPV infection, comprising administering to a patient in need thereof or suspected of being in need thereof:
a) one or more anti-RSV F antibodies according to any of claims 1 to 4;
b) a nucleic acid sequences according to claim 5;
c) an expression vector according to claim 6;
d) a host cell according to claim 7; or
e) a pharmaceutical composition according to any one of claims 8 to 10;
such that the RSV infection or HMPV infection is treated or prevented, or the at least on symptom associated with RSV infection is treated, alleviated, or reduced in severity.

14. The method according to claim 13, wherein the one or more anti-RSV F antibodies is selected from the group consisting of the antibodies designated as Antibody Number 4, 11, or 62 as disclosed in Table 6.

15. The method according to claim 13 or 14, which further comprises administering to the patient a second therapeutic agent optionally selected from the group consisting of an antiviral agent; a vaccine specific for RSV, a vaccine specific for influenza virus, or a vaccine specific for metapneumovirus (MPV); an siRNA specific for an RSV antigen or a metapneumovirus (MPV) antigen; a second antibody specific for an RSV antigen or a metapneumovirus (MPV) antigen; an anti-IL4R antibody, an antibody specific for an influenza virus antigen, an anti-RSV-G antibody, and a NSAID.

The application's sequence listing, which the Patent Office published only in electronic form, follows.

SEQUENCE LISTING (1968 sequences)

SEQ ID NO: 1 - DNA, 363 bp, Artificial Sequence
  Description of Artificial Sequence: Synthetic heavy chain variable region
caggtccagcttgtacagtctggggctgaggtgaagaagcctggggcctcagtgaaggtgtcctgcagggcttctggattcgtcttcaccagttatgatatcaactgggtgcgacaggccccggggcaaggtcttgagtggatggggcgaatgaacgctcacactggacaggtgacgtatgcccagaaattccaggacaaagtctccatgaccagggacgtctccataacgacagcctacctggaactgagtcgcctggcatctgaggacacggccgtctattactgtgcgaggcccgacattaactggggtcaagatgcttttgatgtctggggccagggcacaatggtcaccgtctcttca

SEQ ID NO: 2 - protein, 121 aa, Artificial Sequence
  Description of Artificial Sequence: Synthetic heavy chain variable region
QVQLVQSGAEVKKPGASVKVSCRASGFVFTSYDINWVRQAPGQGLEWMGRMNAHTGQVTYAQKFQDKVSMTRDVSITTAYLELSRLASEDTAVYYCARPDINWGQDAFDVWGQGTMVTVSS

SEQ ID NO: 3 - protein, 9 aa, Artificial Sequence
  Description of Artificial Sequence: Synthetic heavy chain variable region CDR H1
FVFTSYDIN

SEQ ID NO: 4 - DNA, 27 bp, Artificial Sequence
  Description of Artificial Sequence: Synthetic heavy chain variable region CDR H1
ttcgtcttcaccagttatgatatcaac

SEQ ID NO: 5 - protein, 17 aa, Artificial Sequence
  Description of Artificial Sequence: Synthetic heavy chain variable region CDR H2
RMNAHTGQVTYAQKFQD

SEQ ID NO: 6 - DNA, 51 bp, Artificial Sequence
  Description of Artificial Sequence: Synthetic heavy chain variable region CDR H2
cgaatgaacgctcacactggacaggtgacgtatgcccagaaattccaggac

SEQ ID NO: 7 - protein, 14 aa, Artificial Sequence
  Description of Artificial Sequence: Synthetic heavy chain variable region CDR H3
ARPDINWGQDAFDV

SEQ ID NO: 8 - DNA, 42 bp, Artificial Sequence
  Description of Artificial Sequence: Synthetic heavy chain variable region CDR H3
gcgaggcccgacattaactggggtcaagatgcttttgatgtc

SEQ ID NO: 9 - DNA, 318 bp, Artificial Sequence
  Description of Artificial Sequence: Synthetic light chain variable region
gacatccggatgacccagtctccttccaccctgtctgcatctataggagccagagtcaccatcacttgccgggccagtcagaatattggtaacttcttggcctggtatcagcagaagccagggaaagcccctaaactcctgatctataaggcgtctactttagatcctggggtcccatcaaggttcagcggcagcggatctgggacagaattcactctcaccatcaccagcctgcagcctgatgatttcgcaacattttactgccaacagtataagagtgaccccacttttggccaggggaccaaggtggaaatcaaa

SEQ ID NO: 10 - protein, 106 aa, Artificial Sequence
  Description of Artificial Sequence: Synthetic light chain variable region
DIRMTQSPSTLSASIGARVTITCRASQNIGNFLAWYQQKPGKAPKLLIYKASTLDPGVPSRFSGSGSGTEFTLTITSLQPDDFATFYCQQYKSDPTFGQGTKVEIK

SEQ ID NO: 11 - protein, 11 aa, Artificial Sequence
  Description of Artificial Sequence: Synthetic light chain variable region CDR L1
RASQNIGNFLA

SEQ ID NO: 12 - DNA, 33 bp, Artificial Sequence
  Description of Artificial Sequence: Synthetic light chain variable region CDR L1
cgggccagtcagaatattggtaacttcttggcc

SEQ ID NO: 13 - protein, 7 aa, Artificial Sequence
  Description of Artificial Sequence: Synthetic light chain variable region CDR L2
KASTLDP

SEQ ID NO: 14 - DNA, 21 bp, Artificial Sequence
  Description of Artificial Sequence: Synthetic light chain variable region CDR L2
aaggcgtctactttagatcct

SEQ ID NO: 15 - protein, 8 aa, Artificial Sequence
  Description of Artificial Sequence: Synthetic light chain variable region CDR L3
QQYKSDPT

SEQ ID NO: 16 - DNA, 24 bp, Artificial Sequence
  Description of Artificial Sequence: Synthetic light chain variable region CDR L3
caacagtataagagtgaccccact

SEQ ID NO: 17 - DNA, 384 bp, Artificial Sequence
  Description of Artificial Sequence: Synthetic heavy chain variable region
caggtccagctggtgcagtctggggctgaggtgaagaagcctgggtcatcggtgagggtctcctgtagggcttcaggagtcactttgaccaccgttgctgtcaactgggtgcgccaggtccctgggcaagggcctgagtggattggagggatcctcgttgggcttggtaaggtcagactcgcccagaaatttgagaatcgagccactctaagggcggacacatctagcaacacagcctacatggagttgagcggcctgagatttgaggacacggccgtctattattgtgcgataatcgacccccaagattgtactgctgccagctgcttttgggtcaactggctcgacccctggggccagggaaccctggtcaccgtctcctca

SEQ ID NO: 18 - protein, 128 aa, Artificial Sequence
  Description of Artificial Sequence: Synthetic heavy chain variable region
QVQLVQSGAEVKKPGSSVRVSCRASGVTLTTVAVNWVRQVPGQGPEWIGGILVGLGKVRLAQKFENRATLRADTSSNTAYMELSGLRFEDTAVYYCAIIDPQDCTAASCFWVNWLDPWGQGTLVTVSS

SEQ ID NO: 19 - protein, 9 aa, Artificial Sequence
  Description of Artificial Sequence: Synthetic heavy chain variable region CDR H1
VTLTTVAVN

SEQ ID NO: 20 - DNA, 27 bp, Artificial Sequence
  Description of Artificial Sequence: Synthetic heavy chain variable region CDR H1
gtcactttgaccaccgttgctgtcaac

SEQ ID NO: 21 - protein, 17 aa, Artificial Sequence
  Description of Artificial Sequence: Synthetic heavy chain variable region CDR H2
GILVGLGKVRLAQKFEN

SEQ ID NO: 22 - DNA, 51 bp, Artificial Sequence
  Description of Artificial Sequence: Synthetic heavy chain variable region CDR H2
gggatcctcgttgggcttggtaaggtcagactcgcccagaaatttgagaat

SEQ ID NO: 23 - protein, 21 aa, Artificial Sequence
  Description of Artificial Sequence: Synthetic heavy chain variable region CDR H3
AIIDPQDCTAASCFWVNWLDP

SEQ ID NO: 24 - DNA, 63 bp, Artificial Sequence
  Description of Artificial Sequence: Synthetic heavy chain variable region CDR H3
gcgataatcgacccccaagattgtactgctgccagctgcttttgggtcaactggctcgacccc

SEQ ID NO: 25 - DNA, 324 bp, Artificial Sequence
  Description of Artificial Sequence: Synthetic light chain variable region
gaaattgtattgacgcagtctccaggcaccctgaccttgtctccaggggagacagccaccctctcctgcagggccagtcagagtgttcttagtggctacttagcctggtaccagcagaaacctggccaggctcccaggctcctcatctatgctgcatccactagggccactgacatcccagcgaggttcactggcagtgggtctgcgacagacttcactctcaccatcagcagactggagcctcaagattttgcagtgtattactgtcagcagtatggttcggctccgatcaccttcggccaagggacacgactggagattaaa

SEQ ID NO: 26 - protein, 108 aa, Artificial Sequence
  Description of Artificial Sequence: Synthetic light chain variable region
EIVLTQSPGTLTLSPGETATLSCRASQSVLSGYLAWYQQKPGQAPRLLIYAASTRATDIPARFTGSGSATDFTLTISRLEPQDFAVYYCQQYGSAPITFGQGTRLEIK

SEQ ID NO: 27 - protein, 12 aa, Artificial Sequence
  Description of Artificial Sequence: Synthetic light chain variable region CDR L1
RASQSVLSGYLA

SEQ ID NO: 28 - DNA, 36 bp, Artificial Sequence
  Description of Artificial Sequence: Synthetic light chain variable region CDR L1
agggccagtcagagtgttcttagtggctacttagcc

SEQ ID NO: 29 - protein, 7 aa, Artificial Sequence
  Description of Artificial Sequence: Synthetic light chain variable region CDR L2
AASTRAT

SEQ ID NO: 30 - DNA, 21 bp, Artificial Sequence
  Description of Artificial Sequence: Synthetic light chain variable region CDR L2
gctgcatccactagggccact

SEQ ID NO: 31 - protein, 9 aa, Artificial Sequence
  Description of Artificial Sequence: Synthetic light chain variable region CDR L3
QQYGSAPIT

SEQ ID NO: 32 - DNA, 27 bp, Artificial Sequence
  Description of Artificial Sequence: Synthetic light chain variable region CDR L3
cagcagtatggttcggctccgatcacc

SEQ ID NO: 33 - DNA, 384 bp, Artificial Sequence
  Description of Artificial Sequence: Synthetic heavy chain variable region
caggtccagctggtgcagtctggggctgaggtaaagaagcctgggtcatcggtgaaggtctcctgcaaggcctctggaggcaccatcaacaacgttgctatcagttggctgcgacaggcccctggacaaggcctggagtggctgggagggaacatccctggctttggtaaagtcagatactcacagcagtttgagaccagactcactttaaccgcggacgtctcgtccgacacagcctacatggtgttgaccagcctaagatctgaagacacggccgtctattactgtgcgatcatcgacccccaactttgcaccagagccagctgcttttgggtcaactggctcgacccctggggccaggggaccacggtcaccgtctcctca

SEQ ID NO: 34 - protein, 128 aa, Artificial Sequence
  Description of Artificial Sequence: Synthetic heavy chain variable region
QVQLVQSGAEVKKPGSSVKVSCKASGGTINNVAISWLRQAPGQGLEWLGGNIPGFGKVRYSQQFETRLTLTADVSSDTAYMVLTSLRSEDTAVYYCAIIDPQLCTRASCFWVNWLDPWGQGTTVTVSS

SEQ ID NO: 35 - protein, 9 aa, Artificial Sequence
  Description of Artificial Sequence: Synthetic heavy chain variable region CDR H1
GTINNVAIS

SEQ ID NO: 36 - DNA, 27 bp, Artificial Sequence
  Description of Artificial Sequence: Synthetic heavy chain variable region CDR H1
ggcaccatcaacaacgttgctatcagt

SEQ ID NO: 37 - protein, 17 aa, Artificial Sequence
  Description of Artificial Sequence: Synthetic heavy chain variable region CDR H2
GNIPGFGKVRYSQQFET

SEQ ID NO: 38 - DNA, 51 bp, Artificial Sequence
  Description of Artificial Sequence: Synthetic heavy chain variable region CDR H2
gggaacatccctggctttggtaaagtcagatactcacagcagtttgagacc

SEQ ID NO: 39 - protein, 21 aa, Artificial Sequence
  Description of Artificial Sequence: Synthetic heavy chain variable region CDR H3
AIIDPQLCTRASCFWVNWLDP

SEQ ID NO: 40 - DNA, 63 bp, Artificial Sequence
  Description of Artificial Sequence: Synthetic heavy chain variable region CDR H3
gcgatcatcgacccccaactttgcaccagagccagctgcttttgggtcaactggctcgacccc

SEQ ID NO: 41 - DNA, 324 bp, Artificial Sequence
  Description of Artificial Sequence: Synthetic light chain variable region
gatattgtgatgactcagtctccaggcaccctgtctgtgtctccaggggagagtgccgccctctcctgcggggccagtgagagtattctcagcgactccttagcctggtaccagcataaacctggtcaggctcccaggctcctcatctatggtgcatccagtagggccgctggcatcccagacaggttcagtggcagtgggtctgggacagacttcactctcaccatcagcagactggagccagaggattttgcagtgtatttctgtcaacagtttggtgccttaccgatcactttcggccaagggacacgactggagattaaa

SEQ ID NO: 42 - protein, 108 aa, Artificial Sequence
  Description of Artificial Sequence: Synthetic light chain variable region
DIVMTQSPGTLSVSPGESAALSCGASESILSDSLAWYQHKPGQAPRLLIYGASSRAAGIPDRFSGSGSGTDFTLTISRLEPEDFAVYFCQQFGALPITFGQGTRLEIK

SEQ ID NO: 43 - protein, 12 aa, Artificial Sequence
  Description of Artificial Sequence: Synthetic light chain variable region CDR L1
GASESILSDSLA

SEQ ID NO: 44 - DNA, 36 bp, Artificial Sequence
  Description of Artificial Sequence: Synthetic light chain variable region CDR L1
ggggccagtgagagtattctcagcgactccttagcc

SEQ ID NO: 45 - protein, 7 aa, Artificial Sequence
  Description of Artificial Sequence: Synthetic light chain variable region CDR L2
GASSRAA

SEQ ID NO: 46 - DNA, 21 bp, Artificial Sequence
  Description of Artificial Sequence: Synthetic light chain variable region CDR L2
ggtgcatccagtagggccgct

SEQ ID NO: 47 - protein, 9 aa, Artificial Sequence
  Description of Artificial Sequence: Synthetic light chain variable region CDR L3
QQFGALPIT

SEQ ID NO: 48 - DNA, 27 bp, Artificial Sequence
  Description of Artificial Sequence: Synthetic light chain variable region CDR L3
caacagtttggtgccttaccgatcact

SEQ ID NO: 49 - DNA, 363 bp, Artificial Sequence
  Description of Artificial Sequence: Synthetic heavy chain variable region
caggtgcagctggtgcaatctggggctgaggtgaagaagccggggtcctcggtgaaaatctcctgtaaggcttctggaggcaccttcaacagtcaagcaattcactgggtgcgacaggcccctggacaagaccttgagtggatgggaaacatcatccctgggttcggatcaccaaactccgcgcagaacttccagggcagggtcaccttcattgcggacgattccactggcgctgcctacatggacttgagtagcctgaagtctgaagacacggccgtctattactgtgcgacagccgggtggttcggggaatcagttcatttggactcatggggccagggaaccctggtcaccgtctcctca

SEQ ID NO: 50 - protein, 121 aa, Artificial Sequence
  Description of Artificial Sequence: Synthetic heavy chain variable region
QVQLVQSGAEVKKPGSSVKISCKASGGTFNSQAIHWVRQAPGQDLEWMGNIIPGFGSPNSAQNFQGRVTFIADDSTGAAYMDLSSLKSEDTAVYYCATAGWFGESVHLDSWGQGTLVTVSS

SEQ ID NO: 51 - protein, 9 aa, Artificial Sequence
  Description of Artificial Sequence: Synthetic heavy chain variable region CDR H1
GTFNSQAIH

SEQ ID NO: 52 - DNA, 27 bp, Artificial Sequence
  Description of Artificial Sequence: Synthetic heavy chain variable region CDR H1
ggcaccttcaacagtcaagcaattcac

SEQ ID NO: 53 - protein, 17 aa, Artificial Sequence
  Description of Artificial Sequence: Synthetic heavy chain variable region CDR H2
NIIPGFGSPNSAQNFQG

SEQ ID NO: 54 - DNA, 51 bp, Artificial Sequence
  Description of Artificial Sequence: Synthetic heavy chain variable region CDR H2
aacatcatccctgggttcggatcaccaaactccgcgcagaacttccagggc

SEQ ID NO: 55 - protein, 14 aa, Artificial Sequence
  Description of Artificial Sequence: Synthetic heavy chain variable region CDR H3
ATAGWFGESVHLDS

SEQ ID NO: 56 - DNA, 42 bp, Artificial Sequence
  Description of Artificial Sequence: Synthetic heavy chain variable region CDR H3
gcgacagccgggtggttcggggaatcagttcatttggactca

SEQ ID NO: 57 - DNA, 324 bp, Artificial Sequence
  Description of Artificial Sequence: Synthetic light chain variable region
gatattgtgatgactcagtctccagccaccctgtctgtgtctccaggggaaagagccaccctctcctgcagggccagtgagagtgttagcagcaacttagcctggtaccagcagaaacctggccaggctcccaggctcctcatctatggtgcatccaccagggccactggtatcccagccaggttcagtggcagtgggtcagggacggagttcactctcaccatcaacagcctgcagtctgaagattttgcagtttattactgtcagcagtataataactggcctcctctcactttcggcggagggaccaaggtggaaatcaaa

SEQ ID NO: 58 - protein, 108 aa, Artificial Sequence
  Description of Artificial Sequence: Synthetic light chain variable region
DIVMTQSPATLSVSPGERATLSCRASESVSSNLAWYQQKPGQAPRLLIYGASTRATGIPARFSGSGSGTEFTLTINSLQSEDFAVYYCQQYNNWPPLTFGGGTKVEIK

SEQ ID NO: 59 - protein, 11 aa, Artificial Sequence
  Description of Artificial Sequence: Synthetic light chain variable region CDR L1
RASESVSSNLA

SEQ ID NO: 60 - DNA, 33 bp, Artificial Sequence
  Description of Artificial Sequence: Synthetic light chain variable region CDR L1
agggccagtgagagtgttagcagcaacttagcc

SEQ ID NO: 61 - protein, 7 aa, Artificial Sequence
  Description of Artificial Sequence: Synthetic light chain variable region CDR L2
GASTRAT

SEQ ID NO: 62 - DNA, 21 bp, Artificial Sequence
  Description of Artificial Sequence: Synthetic light chain variable region CDR L2
ggtgcatccaccagggccact

SEQ ID NO: 63 - protein, 10 aa, Artificial Sequence
  Description of Artificial Sequence: Synthetic light chain variable region CDR L3
QQYNNWPPLT

SEQ ID NO: 64 - DNA, 30 bp, Artificial Sequence
  Description of Artificial Sequence: Synthetic light chain variable region CDR L3
cagcagtataataactggcctcctctcact

SEQ ID NO: 65 - DNA, 363 bp, Artificial Sequence
  Description of Artificial Sequence: Synthetic heavy chain variable region
caggtccagctggtacagtctggaagtgaggtgaagaagcctggggcctcggtgaaggtctcctgcaaggcctcaggttacaggttttccaactatggtatcagctgggtgcgacaggcccctggacaaggcctagagtggatgggatggatcagcgcttacaatggaaacataaagtatggaaataacctccagggcagagtcaccgtgaccacagacacatccacggccacggcctacatggaggtgaggagcctgacatctgacgacacggccgtgtattactgtgcgagagatgtcccagctgacggggtccacttcatggacgtctggggccaaggaaccctggtcaccgtctcctca

SEQ ID NO: 66 - protein, 121 aa, Artificial Sequence
  Description of Artificial Sequence: Synthetic heavy chain variable region
QVQLVQSGSEVKKPGASVKVSCKASGYRFSNYGISWVRQAPGQGLEWMGWISAYNGNIKYGNNLQGRVTVTTDTSTATAYMEVRSLTSDDTAVYYCARDVPADGVHFMDVWGQGTLVTVSS

SEQ ID NO: 67 - protein, 9 aa, Artificial Sequence
  Description of Artificial Sequence: Synthetic heavy chain variable region CDR H1
YRFSNYGIS

SEQ ID NO: 68 - DNA, 27 bp, Artificial Sequence
  Description of Artificial Sequence: Synthetic heavy chain variable region CDR H1
tacaggttttccaactatggtatcagc

SEQ ID NO: 69 - protein, 17 aa, Artificial Sequence
  Description of Artificial Sequence: Synthetic heavy chain variable region CDR H2
WISAYNGNIKYGNNLQG

SEQ ID NO: 70 - DNA, 51 bp, Artificial Sequence
  Description of Artificial Sequence: Synthetic heavy chain variable region CDR H2
tggatcagcgcttacaatggaaacataaagtatggaaataacctccagggc

SEQ ID NO: 71 - protein, 14 aa, Artificial Sequence
  Description of Artificial Sequence: Synthetic heavy chain variable region CDR H3
ARDVPADGVHFMDV

SEQ ID NO: 72 - DNA, 42 bp, Artificial Sequence
  Description of Artificial Sequence: Synthetic heavy chain variable region CDR H3
gcgagagatgtcccagctgacggggtccacttcatggacgtc

SEQ ID NO: 73 - DNA, 336 bp, Artificial Sequence
  Description of Artificial Sequence: Synthetic light chain variable region
gaaattgtaatgacacagtctccactctccctgcccgtcacccttggacagccggcctccatctcctgcaggtctagtcaaagcctcgtacacagtgatactaacacctacttgaactggtttcagcagaggccaggccaatctccacggcgcctaatttataaggtttctaaccgggactctggggtcccagacagattcagcggcagtgggtcaggcactactttcacactgaaaatcagcagggtggaggctgaggatgttgggatttattactgcatgcagggttcacactgggctccgactttcggccaggggaccaaggtggaaatcaaa

SEQ ID NO: 74 - protein, 112 aa, Artificial Sequence
  Description of Artificial Sequence: Synthetic light chain variable region
EIVMTQSPLSLPVTLGQPASISCRSSQSLVHSDTNTYLNWFQQRPGQSPRRLIYKVSNRDSGVPDRFSGSGSGTTFTLKISRVEAEDVGIYYCMQGSHWAPTFGQGTKVEIK

SEQ ID NO: 75 - protein, 16 aa, Artificial Sequence
  Description of Artificial Sequence: Synthetic light chain variable region CDR L1
RSSQSLVHSDTNTYLN

SEQ ID NO: 76 - DNA, 48 bp, Artificial Sequence
  Description of Artificial Sequence: Synthetic light chain variable region CDR L1
aggtctagtcaaagcctcgtacacagtgatactaacacctacttgaac

SEQ ID NO: 77 - protein, 7 aa, Artificial Sequence
  Description of Artificial Sequence: Synthetic light chain variable region CDR L2
KVSNRDS

SEQ ID NO: 78 - DNA, 21 bp, Artificial Sequence
  Description of Artificial Sequence: Synthetic light chain variable region CDR L2
aaggtttctaaccgggactct

SEQ ID NO: 79 - protein, 9 aa, Artificial Sequence
  Description of Artificial Sequence: Synthetic light chain variable region CDR L3
MQGSHWAPT

SEQ ID NO: 80 - DNA, 27 bp, Artificial Sequence
  Description of Artificial Sequence: Synthetic light chain variable region CDR L3
atgcagggttcacactgggctccgact

SEQ ID NO: 81 - DNA, 378 bp, Artificial Sequence
  Description of Artificial Sequence: Synthetic heavy chain variable region
caggtccagctggtgcagtctgggactgaggtgaagaagcctgggtcctcggtgaaggtctcctgcaaggcttctggaggcaccttcggcagctacgctgtcatctgggtgcgacaggcccctggacaagggcttgaatggatgggacatttcatccctgtgtttgctacaacaaacaaggcacagaagttccagggcagactcacccttagtacagacgaatctacgggcacagtctacatggagctgagcagcctgagatctgaggacacggccgtctatttctgtgcgaccaagagatattgtagtgatcccagctgccatggactctggtacttcgatctctggggccgtggcaccctggtcactgtctcctca

SEQ ID NO: 82 - protein, 126 aa, Artificial Sequence
  Description of Artificial Sequence: Synthetic heavy chain variable region
QVQLVQSGTEVKKPGSSVKVSCKASGGTFGSYAVIWVRQAPGQGLEWMGHFIPVFATTNKAQKFQGRLTLSTDESTGTVYMELSSLRSEDTAVYFCATKRYCSDPSCHGLWYFDLWGRGTLVTVSS

SEQ ID NO: 83 - protein, 9 aa, Artificial Sequence
  Description of Artificial Sequence: Synthetic heavy chain variable region CDR H1
GTFGSYAVI

SEQ ID NO: 84 - DNA, 27 bp, Artificial Sequence
  Description of Artificial Sequence: Synthetic heavy chain variable region CDR H1
ggcaccttcggcagctacgctgtcatc

SEQ ID NO: 85 - protein, 17 aa, Artificial Sequence
  Description of Artificial Sequence: Synthetic heavy chain variable region CDR H2
HFIPVFATTNKAQKFQG

SEQ ID NO: 86 - DNA, 51 bp, Artificial Sequence
  Description of Artificial Sequence: Synthetic heavy chain variable region CDR H2
catttcatccctgtgtttgctacaacaaacaaggcacagaagttccagggc

SEQ ID NO: 87 - protein, 19 aa, Artificial Sequence
  Description of Artificial Sequence: Synthetic heavy chain variable region CDR H3
ATKRYCSDPSCHGLWYFDL

SEQ ID NO: 88 - DNA, 57 bp, Artificial Sequence
  Description of Artificial Sequence: Synthetic heavy chain variable region CDR H3
gcgaccaagagatattgtagtgatcccagctgccatggactctggtacttcgatctc

SEQ ID NO: 89 - DNA, 339 bp, Artificial Sequence
  Description of Artificial Sequence: Synthetic light chain variable region
gacatccagttgacccagtctccactctccctgcccgtcacccctggagagccggcctccatctcctgcaggtctagtcagagcctcttggatagtgatgatggaaacacctatttggactggtacctgcagaagccagggcagtctccacaggtcctgatctatatgctttcgtatcgggcctctggagtcccagacaggttcagtggcagtgggtcaggcactgatttcacactagaaatcagcagggtggaggctgaggatgttggagtttattactgcatgcaacgtgtagagtttccttacacttttggccaggggaccaagctggagatcaaa

SEQ ID NO: 90 - protein, 113 aa, Artificial Sequence
  Description of Artificial Sequence: Synthetic light chain variable region
DIQLTQSPLSLPVTPGEPASISCRSSQSLLDSDDGNTYLDWYLQKPGQSPQVLIYMLSYRASGVPDRFSGSGSGTDFTLEISRVEAEDVGVYYCMQRVEFPYTFGQGTKLEIK

SEQ ID NO: 91 - protein, 17 aa, Artificial Sequence
  Description of Artificial Sequence: Synthetic light chain variable region CDR L1
RSSQSLLDSDDGNTYLD

SEQ ID NO: 92 - DNA, 51 bp, Artificial Sequence
  Description of Artificial Sequence: Synthetic light chain variable region CDR L1
aggtctagtcagagcctcttggatagtgatgatggaaacacctatttggac

SEQ ID NO: 93 - protein, 7 aa, Artificial Sequence
  Description of Artificial Sequence: Synthetic light chain variable region CDR L2
MLSYRAS

SEQ ID NO: 94 - DNA, 21 bp, Artificial Sequence
  Description of Artificial Sequence: Synthetic light chain variable region CDR L2
atgctttcgtatcgggcctct

SEQ ID NO: 95 - protein, 9 aa, Artificial Sequence
  Description of Artificial Sequence: Synthetic light chain variable region CDR L3
MQRVEFPYT

SEQ ID NO: 96 - DNA, 27 bp, Artificial Sequence
  Description of Artificial Sequence: Synthetic light chain variable region CDR L3
atgcaacgtgtagagtttccttacact

SEQ ID NO: 97 - DNA, 345 bp, Artificial Sequence
  Description of Artificial Sequence: Synthetic heavy chain variable region
caggtccagctggtgcagtctgggcctgacgtgaagagacctggggcctcagtgagagtctcctgcaaggcttctggatacaccttcagcgactactatatgcactgggtgcgacaggcccctggacagggtcttgaatggctggcttgggtcaaccctagcactggcgccacacactactcagagagttttcggggctctatggtcgttcaaagggacacgtccaccgacacagcctacctggagctgagtagtctgaaatctgacgacacggccgtctattattgtgcgagaatcgggagtaatgagatttggggccaggggacaatggtcaccgtctcttca

SEQ ID NO: 98 - protein, 115 aa, Artificial Sequence
  Description of Artificial Sequence: Synthetic heavy chain variable region
QVQLVQSGPDVKRPGASVRVSCKASGYTFSDYYMHWVRQAPGQGLEWLAWVNPSTGATHYSESFRGSMVVQRDTSTDTAYLELSSLKSDDTAVYYCARIGSNEIWGQGTMVTVSS

SEQ ID NO: 99 - protein, 9 aa, Artificial Sequence
  Description of Artificial Sequence: Synthetic heavy chain variable region CDR H1
YTFSDYYMH

SEQ ID NO: 100 - DNA, 27 bp, Artificial Sequence
  Description of Artificial Sequence: Synthetic heavy chain variable region CDR H1
tacaccttcagcgactactatatgcac

SEQ ID NO: 101 - protein, 17 aa, Artificial Sequence
  Description of Artificial Sequence: Synthetic heavy chain variable region CDR H2
WVNPSTGATHYSESFRG

SEQ ID NO: 102 - DNA, 51 bp, Artificial Sequence
  Description of Artificial Sequence: Synthetic heavy chain variable region CDR H2
tgggtcaaccctagcactggcgccacacactactcagagagttttcggggc

SEQ ID NO: 103 - protein, 8 aa, Artificial Sequence
  Description of Artificial Sequence: Synthetic heavy chain variable region CDR H3
ARIGSNEI

SEQ ID NO: 104 - DNA, 24 bp, Artificial Sequence
  Description of Artificial Sequence: Synthetic heavy chain variable region CDR H3
gcgagaatcgggagtaatgagatt

SEQ ID NO: 105 - DNA, 330 bp, Artificial Sequence
  Description of Artificial Sequence: Synthetic light chain variable region
cagtctgccctgactcagcctgcctccgtgtctgggtctcctggacagtcgatcaccatctcctgcgctggcacttccagtgacattggtggttggaactatgtctcctggtaccaacagtaccccggccaagtccccaaactcatcctttatgaagtcactgataggccctcaggggtttctcatcgcttctctggctccaagtctggcaacagggccttccttaccatcactgggctccgggccgaggacgaggctgattattactgctgctcatttacttcttccggcagtagggttttcggcggagggaccaaggtcaccgtccta

SEQ ID NO: 106 - protein, 110 aa, Artificial Sequence
  Description of Artificial Sequence: Synthetic light chain variable region
QSALTQPASVSGSPGQSITISCAGTSSDIGGWNYVSWYQQYPGQVPKLILYEVTDRPSGVSHRFSGSKSGNRAFLTITGLRAEDEADYYCCSFTSSGSRVFGGGTKVTVL

SEQ ID NO: 107 - protein, 14 aa, Artificial Sequence
  Description of Artificial Sequence: Synthetic light chain variable region CDR L1
AGTSSDIGGWNYVS

SEQ ID NO: 108 - DNA, 42 bp, Artificial Sequence
  Description of Artificial Sequence: Synthetic light chain variable region CDR L1
gctggcacttccagtgacattggtggttggaactatgtctcc

SEQ ID NO: 109 - protein, 7 aa, Artificial Sequence
  Description of Artificial Sequence: Synthetic light chain variable region CDR L2
EVTDRPS

SEQ ID NO: 110 - DNA, 21 bp, Artificial Sequence
  Description of Artificial Sequence: Synthetic light chain variable region CDR L2
gaagtcactgataggccctca

SEQ ID NO: 111 - protein, 10 aa, Artificial Sequence
  Description of Artificial Sequence: Synthetic light chain variable region CDR L3
CSFTSSGSRV

SEQ ID NO: 112 - DNA, 30 bp, Artificial Sequence
  Description of Artificial Sequence: Synthetic light chain variable region CDR L3
tgctcatttacttcttccggcagtagggtt

SEQ ID NO: 113 - DNA, 384 bp, Artificial Sequence
  Description of Artificial Sequence: Synthetic heavy chain variable region
gaggtgcagctgttggagtctggggctgtgatgaagaggcctgggtcatcggtgagggtctcctgcagggcttcaggagtcactttgaccaccgtttctgtcaactgggtgcgccaggtccctgggcaagggcctgagtggattggagggatcctcattgggtttggtaaggtcagacaagcccagaaatttgagaaccgagtcactctgaccgcggacgcatcaaggaacacagcatatatggagttgagcggactgacatctgacgacacggccgtctattactgtgcgataatcgacccccaagattgtactcgtgccagctgcttttgggtcaactggctcgacccctggggccagggaaccctggtcaccgtctcctca

SEQ ID NO: 114 - protein, 128 aa, Artificial Sequence
  Description of Artificial Sequence: Synthetic heavy chain variable region
EVQLLESGAVMKRPGSSVRVSCRASGVTLTTVSVNWVRQVPGQGPEWIGGILIGFGKVRQAQKFENRVTLTADASRNTAYMELSGLTSDDTAVYYCAIIDPQDCTRASCFWVNWLDPWGQGTLVTVSS

SEQ ID NO: 115 - protein, 9 aa, Artificial Sequence
  Description of Artificial Sequence: Synthetic heavy chain variable region CDR H1
VTLTTVSVN

SEQ ID NO: 116 - DNA, 27 bp, Artificial Sequence
  Description of Artificial Sequence: Synthetic heavy chain variable region CDR H1
gtcactttgaccaccgtttctgtcaac

SEQ ID NO: 117 - protein, 17 aa, Artificial Sequence
  Description of Artificial Sequence: Synthetic heavy chain variable region CDR H2
GILIGFGKVRQAQKFEN

SEQ ID NO: 118 - DNA, 51 bp, Artificial Sequence
  Description of Artificial Sequence: Synthetic heavy chain variable region CDR H2
gggatcctcattgggtttggtaaggtcagacaagcccagaaatttgagaac

SEQ ID NO: 119 - protein, 21 aa, Artificial Sequence
  Description of Artificial Sequence: Synthetic heavy chain variable region CDR H3
AIIDPQDCTRASCFWVNWLDP

SEQ ID NO: 120 - DNA, 63 bp, Artificial Sequence
  Description of Artificial Sequence: Synthetic heavy chain variable region CDR H3
gcgataatcgacccccaagattgtactcgtgccagctgcttttgggtcaactggctcgacccc

SEQ ID NO: 121 - DNA, 324 bp, Artificial Sequence
  Description of Artificial Sequence: Synthetic light chain variable region
gacatccggatgacccagtctccaggcaccctgaccttgtccccaggggagcgagccaccctctcctgcagggccagtcagagtattcttagcgggaacttagcctggtaccagcagaaacctggccaggctcccaggctcctcatctctgctgcatccactagggccactgacatcccagacaggttcagtggcagtgggtctgggacagacttcactctcaccatcaccagactggagcctcaagattttgcagtgtattactgtcagcagtatgattcggctccgatcaccttcggccaagggacacgactggagattaaa

SEQ ID NO: 122 - protein, 108 aa, Artificial Sequence
  Description of Artificial Sequence: Synthetic light chain variable region
DIRMTQSPGTLTLSPGERATLSCRASQSILSGNLAWYQQKPGQAPRLLISAASTRATDIPDRFSGSGSGTDFTLTITRLEPQDFAVYYCQQYDSAPITFGQGTRLEIK

SEQ ID NO: 123 - protein, 12 aa, Artificial Sequence
  Description of Artificial Sequence: Synthetic light chain variable region CDR L1
RASQSILSGNLA

SEQ ID NO: 124 - DNA, 36 bp, Artificial Sequence
  Description of Artificial Sequence: Synthetic light chain variable region CDR L1
agggccagtcagagtattcttagcgggaacttagcc

SEQ ID NO: 125 - protein, 7 aa, Artificial Sequence
  Description of Artificial Sequence: Synthetic light chain variable region CDR L2
AASTRAT

SEQ ID NO: 126 - DNA, 21 bp, Artificial Sequence
  Description of Artificial Sequence: Synthetic light chain variable region CDR L2
gctgcatccactagggccact

SEQ ID NO: 127 - protein, 9 aa, Artificial Sequence
  Description of Artificial Sequence: Synthetic light chain variable region CDR L3
QQYDSAPIT

SEQ ID NO: 128 - DNA, 27 bp, Artificial Sequence
  Description of Artificial Sequence: Synthetic light chain variable region CDR L3
cagcagtatgattcggctccgatcacc

SEQ ID NO: 129 - DNA, 378 bp, Artificial Sequence
  Description of Artificial Sequence: Synthetic heavy chain variable region
caggtccagcttgtgcagtctggggctgaggtgaagaagcctgggtcctcggtgaaggtctcctgcgaggcttctggagacaccttcaccagttatgcagtcatctgggtgcgccagaccccaggacaagggcttgagttcatgggaagtatcatccctatctttcaaacaataaactacgctccgaagttccaggggagggtcaccctaagcgcggacggatccacgagcacagtcttcatggagttgcgaaacctgagatctgaggacacggccatatatttctgtgcgaccaagagatattgtactagtcccagctgccatggactctggtacttcaatctctggggccgtggcacaatggtcaccgtctcttca

SEQ ID NO: 130 - protein, 126 aa, Artificial Sequence
  Description of Artificial Sequence: Synthetic heavy chain variable region
QVQLVQSGAEVKKPGSSVKVSCEASGDTFTSYAVIWVRQTPGQGLEFMGSIIPIFQTINYAPKFQGRVTLSADGSTSTVFMELRNLRSEDTAIYFCATKRYCTSPSCHGLWYFNLWGRGTMVTVSS

SEQ ID NO: 131 - protein, 9 aa, Artificial Sequence
  Description of Artificial Sequence: Synthetic heavy chain variable region CDR H1
DTFTSYAVI

SEQ ID NO: 132 - DNA, 27 bp, Artificial Sequence
  Description of Artificial Sequence: Synthetic heavy chain variable region CDR H1
gacaccttcaccagttatgcagtcatc

SEQ ID NO: 133 - protein, 17 aa, Artificial Sequence
  Description of Artificial Sequence: Synthetic heavy chain variable region CDR H2
SIIPIFQTINYAPKFQG

SEQ ID NO: 134 - DNA, 51 bp, Artificial Sequence
  Description of Artificial Sequence: Synthetic heavy chain variable region CDR H2
agtatcatccctatctttcaaacaataaactacgctccgaagttccagggg

SEQ ID NO: 135 - protein, 19 aa, Artificial Sequence
  Description of Artificial Sequence: Synthetic heavy chain variable region CDR H3
ATKRYCTSPSCHGLWYFNL

SEQ ID NO: 136 - DNA, 57 bp, Artificial Sequence
  Description of Artificial Sequence: Synthetic heavy chain variable region CDR H3
gcgaccaagagatattgtactagtcccagctgccatggactctggtacttcaatctc

SEQ ID NO: 137 - DNA, 339 bp, Artificial Sequence
  Description of Artificial Sequence: Synthetic light chain variable region
gaaacgacactcacgcagtctccaatctccctgtccgtcacccctggagagccggcctccatctcctgcaggtctagtaagagcctcttggatagtgatgatggaaacacttatttggactggtacctgcagaagccagggcagtctccacagatcctgatctatatgctttcgtatcgggcctctggagtcccagacaggttcagtggcagtgggtcaggcactgatttcacactgaaaatcagcagggtggaggctgaggatgttggagtttattactgcatgcaacgtatagagtatccttacacttttggccaggggaccaaggtggagatcaaa

SEQ ID NO: 138 - protein, 113 aa, Artificial Sequence
  Description of Artificial Sequence: Synthetic light chain variable region
ETTLTQSPISLSVTPGEPASISCRSSKSLLDSDDGNTYLDWYLQKPGQSPQILIYMLSYRASGVPDRFSGSGSGTDFTLKISRVEAEDVGVYYCMQRIEYPYTFGQGTKVEIK

SEQ ID NO: 139 - protein, 17 aa, Artificial Sequence
  Description of Artificial Sequence: Synthetic light chain variable region CDR L1
RSSKSLLDSDDGNTYLD

SEQ ID NO: 140 - DNA, 51 bp, Artificial Sequence
  Description of Artificial Sequence: Synthetic light chain variable region CDR L1
aggtctagtaagagcctcttggatagtgatgatggaaacacttatttggac

SEQ ID NO: 141 - protein, 7 aa, Artificial Sequence
  Description of Artificial Sequence: Synthetic light chain variable region CDR L2
MLSYRAS

SEQ ID NO: 142 - DNA, 21 bp, Artificial Sequence
  Description of Artificial Sequence: Synthetic light chain variable region CDR L2
atgctttcgtatcgggcctct

SEQ ID NO: 143 - protein, 9 aa, Artificial Sequence
  Description of Artificial Sequence: Synthetic light chain variable region CDR L3
MQRIEYPYT

SEQ ID NO: 144 - DNA, 27 bp, Artificial Sequence
  Description of Artificial Sequence: Synthetic light chain variable region CDR L3
atgcaacgtatagagtatccttacact

SEQ ID NO: 145 - DNA, 363 bp, Artificial Sequence
  Description of Artificial Sequence: Synthetic heavy chain variable region
caggtgcagctggtgcaatctggggctgagatgaagaagcctgggtcctcggtgacagtctcctgcaaggcttctggagtccccttcaccagttatacctacagctgggtgcgacaggcccctggacaagggcttgagtggatgggaagggtcctccctgtcataggttcggcaaagtacccacagaagttccagggcacagtcaccattaccgcggacaaatccacgagcacaatatatttgcaactgagcagcctaagacctgaagacacggccatttatttctgtgcgggaagtctactggctgggtacgacagggaatttgactcctggggccagggaaccctggtcaccgtctcctca

SEQ ID NO: 146 - protein, 121 aa, Artificial Sequence
  Description of Artificial Sequence: Synthetic heavy chain variable region
QVQLVQSGAEMKKPGSSVTVSCKASGVPFTSYTYSWVRQAPGQGLEWMGRVLPVIGSAKYPQKFQGTVTITADKSTSTIYLQLSSLRPEDTAIYFCAGSLLAGYDREFDSWGQGTLVTVSS

SEQ ID NO: 147 - protein, 9 aa, Artificial Sequence
  Description of Artificial Sequence: Synthetic heavy chain variable region CDR H1
VPFTSYTYS

SEQ ID NO: 148 - DNA, 27 bp, Artificial Sequence
  Description of Artificial Sequence: Synthetic heavy chain variable region CDR H1
gtccccttcaccagttatacctacagc

SEQ ID NO: 149 - protein, 17 aa, Artificial Sequence
  Description of Artificial Sequence: Synthetic heavy chain variable region CDR H2
RVLPVIGSAKYPQKFQG

SEQ ID NO: 150 - DNA, 51 bp, Artificial Sequence
  Description of Artificial Sequence: Synthetic heavy chain variable region CDR H2
agggtcctccctgtcataggttcggcaaagtacccacagaagttccagggc

SEQ ID NO: 151 - protein, 14 aa, Artificial Sequence
  Description of Artificial Sequence: Synthetic heavy chain variable region CDR H3
AGSLLAGYDREFDS

SEQ ID NO: 152 - DNA, 42 bp, Artificial Sequence
  Description of Artificial Sequence: Synthetic heavy chain variable region CDR H3
gcgggaagtctactggctgggtacgacagggaatttgactcc

SEQ ID NO: 153 - DNA, 321 bp, Artificial Sequence
  Description of Artificial Sequence: Synthetic light chain variable region
gacatccagatgacccagtctccatcctcactgtctgcatctgtgggagacagaatcaccatcacttgtcgggcgagtcagggtattagcaactggttagcctggtatcagcagaagccagggaaagcccctaagtccctgatctatgaagcatccactttgcaaagtggggtttcatcaaggttcagcggcagtggatctgggacacacttcactctcaccatcgccagcctgcagcctgaagattttgcaacttattactgccaacagtattatatttacccgctcactttcggcggagggaccaagctggagatcaaa

SEQ ID NO: 154 - protein, 107 aa, Artificial Sequence
  Description of Artificial Sequence: Synthetic light chain variable region
DIQMTQSPSSLSASVGDRITITCRASQGISNWLAWYQQKPGKAPKSLIYEASTLQSGVSSRFSGSGSGTHFTLTIASLQPEDFATYYCQQYYIYPLTFGGGTKLEIK

SEQ ID NO: 155 - protein, 11 aa, Artificial Sequence
  Description of Artificial Sequence: Synthetic light chain variable region CDR L1
RASQGISNWLA

SEQ ID NO: 156 - DNA, 33 bp, Artificial Sequence
  Description of Artificial Sequence: Synthetic light chain variable region CDR L1
cgggcgagtcagggtattagcaactggttagcc

SEQ ID NO: 157 - protein, 7 aa, Artificial Sequence
  Description of Artificial Sequence: Synthetic light chain variable region CDR L2
EASTLQS

SEQ ID NO: 158 - DNA, 21 bp, Artificial Sequence
  Description of Artificial Sequence: Synthetic light chain variable region CDR L2
gaagcatccactttgcaaagt

SEQ ID NO: 159 - protein, 9 aa, Artificial Sequence
  Description of Artificial Sequence: Synthetic light chain variable region CDR L3
QQYYIYPLT

SEQ ID NO: 160 - DNA, 27 bp, Artificial Sequence
  Description of Artificial Sequence: Synthetic light chain variable region CDR L3
caacagtattatatttacccgctcact

SEQ ID NO: 161 - DNA, 360 bp, Artificial Sequence
  Description of Artificial Sequence: Synthetic heavy chain variable region
gaggtgcagctggtggagtctgggggaggcttggtcaagcctggagggtccctaaggctctcctgtgcagcctctggaagctccttccgttattcctacatgagttgggtccgccaggctccagggaaggggctgcagtgggttgcatctattagtcctagtagcacttatacagactacgcagactctgtgaagggccgaagcaccatctccagagaccacgacaagatctctctgcaagtgaacagcctgagaggcgacgacacggccgtgtattattgtgtgagacatatgaatttggtgatggggccgttcgcctttgatatctggggccgcgggacaatggtcaccgtctcttca

SEQ ID NO: 162 - protein, 120 aa, Artificial Sequence
  Description of Artificial Sequence: Synthetic heavy chain variable region
EVQLVESGGGLVKPGGSLRLSCAASGSSFRYSYMSWVRQAPGKGLQWVASISPSSTYTDYADSVKGRSTISRDHDKISLQVNSLRGDDTAVYYCVRHMNLVMGPFAFDIWGRGTMVTVSS

SEQ ID NO: 163 - protein, 9 aa, Artificial Sequence
  Description of Artificial Sequence: Synthetic heavy chain variable region CDR H1
SSFRYSYMS

SEQ ID NO: 164 - DNA, 27 bp, Artificial Sequence
  Description of Artificial Sequence: Synthetic heavy chain variable region CDR H1
agctccttccgttattcctacatgagt

SEQ ID NO: 165 - protein, 17 aa, Artificial Sequence
  Description of Artificial Sequence: Synthetic heavy chain variable region CDR H2
SISPSSTYTDYADSVKG

SEQ ID NO: 166 - DNA, 51 bp, Artificial Sequence
  Description of Artificial Sequence: Synthetic heavy chain variable region CDR H2
tctattagtcctagtagcacttatacagactacgcagactctgtgaagggc

SEQ ID NO: 167 - protein, 15 aa, Artificial Sequence
  Description of Artificial Sequence: Synthetic heavy chain variable region CDR H3
VRHMNLVMGPFAFDI

SEQ ID NO: 168 - DNA, 45 bp, Artificial Sequence
  Description of Artificial Sequence: Synthetic heavy chain variable region CDR H3
gtgagacatatgaatttggtgatggggccgttcgcctttgatatc

SEQ ID NO: 169 - DNA, 330 bp, Artificial Sequence
  Description of Artificial Sequence: Synthetic light chain variable region
cagtctgtcgtgacgcagccgccctcattgtctggggccccagggcagaggatcaccatttcgtgcactgggagcagctccaacatcggggcaggttatgatgtaaactggtaccagcagcttccaggaacagcccccaaactcctcatctatgctaagaccaatcggccctcaggggtccctgagcgcttctctggttccgagtctggcacctccgcctccctggccatcactgggctccagcctgaggatgaggctgattattactgccagtcatatgacaggatcggaatgtatgtcttcggaactgggaccaagctgaccgtccta

SEQ ID NO: 170 - protein, 110 aa, Artificial Sequence
  Description of Artificial Sequence: Synthetic light chain variable region
QSVVTQPPSLSGAPGQRITISCTGSSSNIGAGYDVNWYQQLPGTAPKLLIYAKTNRPSGVPERFSGSESGTSASLAITGLQPEDEADYYCQSYDRIGMYVFGTGTKLTVL

SEQ ID NO: 171 - protein, 14 aa, Artificial Sequence
  Description of Artificial Sequence: Synthetic light chain variable region CDR L1
TGSSSNIGAGYDVN

SEQ ID NO: 172 - DNA, 42 bp, Artificial Sequence
  Description of Artificial Sequence: Synthetic light chain variable region CDR L1
actgggagcagctccaacatcggggcaggttatgatgtaaac

SEQ ID NO: 173 - protein, 7 aa, Artificial Sequence
  Description of Artificial Sequence: Synthetic light chain variable region CDR L2
AKTNRPS

SEQ ID NO: 174 - DNA, 21 bp, Artificial Sequence
  Description of Artificial Sequence: Synthetic light chain variable region CDR L2
gctaagaccaatcggccctca

SEQ ID NO: 175 - protein, 10 aa, Artificial Sequence
  Description of Artificial Sequence: Synthetic light chain variable region CDR L3
QSYDRIGMYV

SEQ ID NO: 176 - DNA, 30 bp, Artificial Sequence
  Description of Artificial Sequence: Synthetic light chain variable region CDR L3
cagtcatatgacaggatcggaatgtatgtc

SEQ ID NO: 177 - DNA, 384 bp, Artificial Sequence
  Description of Artificial Sequence: Synthetic heavy chain variable region
gaggtgcagctggtggagtctgggggagacttggtaaagcctggggggtccctcagactctcatgtgaaggctctggcttcatttttccgaacgcctggatgagctgggtccgccaggctccagggaaggggctggagtgggttggccgtattaaaagcaacactgacggtgggacaacagactacggtgcacccgtgaaaggcagattcaccatctcaagagatgattcaacaaacacgatgtatctgcacatgaacagcctgaagaccgaggacacagccgtgtatttctgttccacaggcccaccctataagtattttgatgagactggttattcggtcgttgactactggggccagggaaccctggtcaccgtctcctca

SEQ ID NO: 178 - protein, 128 aa, Artificial Sequence
  Description of Artificial Sequence: Synthetic heavy chain variable region
EVQLVESGGDLVKPGGSLRLSCEGSGFIFPNAWMSWVRQAPGKGLEWVGRIKSNTDGGTTDYGAPVKGRFTISRDDSTNTMYLHMNSLKTEDTAVYFCSTGPPYKYFDETGYSVVDYWGQGTLVTVSS

SEQ ID NO: 179 - protein, 9 aa, Artificial Sequence
  Description of Artificial Sequence: Synthetic heavy chain variable region CDR H1
FIFPNAWMS

SEQ ID NO: 180 - DNA, 27 bp, Artificial Sequence
  Description of Artificial Sequence: Synthetic heavy chain variable region CDR H1
ttcatttttccgaacgcctggatgagc

SEQ ID NO: 181 - protein, 19 aa, Artificial Sequence
  Description of Artificial Sequence: Synthetic heavy chain variable region CDR H2
RIKSNTDGGTTDYGAPVKG

SEQ ID NO: 182 - DNA, 57 bp, Artificial Sequence
  Description of Artificial Sequence: Synthetic heavy chain variable region CDR H2
cgtattaaaagcaacactgacggtgggacaacagactacggtgcacccgtgaaaggc

SEQ ID NO: 183 - protein, 19 aa, Artificial Sequence
  Description of Artificial Sequence: Synthetic heavy chain variable region CDR H3
STGPPYKYFDETGYSVVDY

SEQ ID NO: 184 - DNA, 57 bp, Artificial Sequence
  Description of Artificial Sequence: Synthetic heavy chain variable region CDR H3
tccacaggcccaccctataagtattttgatgagactggttattcggtcgttgactac

SEQ ID NO: 185 - DNA, 330 bp, Artificial Sequence
  Description of Artificial Sequence: Synthetic light chain variable region
tcctatgagctgacacagccaccctcagcgtctgggacccccgggcagagggtcatcatctcttgttctggaagcacgtccaattccggatataattatttttactggtatcagcagcgcccaggaacggcccccaaactcctcatctatggcagtgatcagcggccctcaggggtccctgaccgattctctggttcccagtctggcccctcagcctccctggccatcagtgggctccggtccgaggatgaggctcattattactgtgcagcgtgggatgacaacctgagtggtccggtgttcggcggagggaccaagctcaccgtccta

SEQ ID NO: 186 - protein, 110 aa, Artificial Sequence
  Description of Artificial Sequence: Synthetic light chain variable region
SYELTQPPSASGTPGQRVIISCSGSTSNSGYNYFYWYQQRPGTAPKLLIYGSDQRPSGVPDRFSGSQSGPSASLAISGLRSEDEAHYYCAAWDDNLSGPVFGGGTKLTVL

SEQ ID NO: 187 - protein, 13 aa, Artificial Sequence
  Description of Artificial Sequence: Synthetic light chain variable region CDR L1
SGSTSNSGYNYFY

SEQ ID NO: 188 - DNA, 39 bp, Artificial Sequence
  Description of Artificial Sequence: Synthetic light chain variable region CDR L1
tctggaagcacgtccaattccggatataattatttttac

SEQ ID NO: 189 - protein, 7 aa, Artificial Sequence
  Description of Artificial Sequence: Synthetic light chain variable region CDR L2
GSDQRPS

SEQ ID NO: 190 - DNA, 21 bp, Artificial Sequence
  Description of Artificial Sequence: Synthetic light chain variable region CDR L2
ggcagtgatcagcggccctca

SEQ ID NO: 191 - protein, 11 aa, Artificial Sequence
  Description of Artificial Sequence: Synthetic light chain variable region CDR L3
AAWDDNLSGPV

SEQ ID NO: 192 - DNA, 33 bp, Artificial Sequence
  Description of Artificial Sequence: Synthetic light chain variable region CDR L3
gcagcgtgggatgacaacctgagtggtccggtg

SEQ ID NO: 193 - DNA, 384 bp, Artificial Sequence
  Description of Artificial Sequence: Synthetic heavy chain variable region
caggtccagcttgtacagtctgggggaggcttggtaaagcctggggggtcccgaagactcgcatgtgcagcctctggattcatcttccgcaacgcctggatgagctgggtccgccaggctccagggaaggggctggagtgggttggccggattaaaaggacaagtgaaggagggtcagtcgactacgcgacacccgtgcaaggcagattctccatctcaagagatgattctagaaacacactgtatctacaaatgcacagcctggcacccgacgacacagccgtgtattactgttccacaggcccaccctattcttactttgatagtactggttattcggtcgtggactactggggccagggaaccctggtcaccgtctcttca

SEQ ID NO: 194 - protein, 128 aa, Artificial Sequence
  Description of Artificial Sequence: Synthetic heavy chain variable region
QVQLVQSGGGLVKPGGSRRLACAASGFIFRNAWMSWVRQAPGKGLEWVGRIKRTSEGGSVDYATPVQGRFSISRDDSRNTLYLQMHSLAPDDTAVYYCSTGPPYSYFDSTGYSVVDYWGQGTLVTVSS

SEQ ID NO: 195 - protein, 9 aa, Artificial Sequence
  Description of Artificial Sequence: Synthetic heavy chain variable region CDR H1
FIFRNAWMS

SEQ ID NO: 196 - DNA, 27 bp, Artificial Sequence
  Description of Artificial Sequence: Synthetic heavy chain variable region CDR H1
ttcatcttccgcaacgcctggatgagc

SEQ ID NO: 197 - protein, 19 aa, Artificial Sequence
  Description of Artificial Sequence: Synthetic heavy chain variable region CDR H2
RIKRTSEGGSVDYATPVQG

SEQ ID NO: 198 - DNA, 57 bp, Artificial Sequence
  Description of Artificial Sequence: Synthetic heavy chain variable region CDR H2
cggattaaaaggacaagtgaaggagggtcagtcgactacgcgacacccgtgcaaggc

SEQ ID NO: 199 - protein, 19 aa, Artificial Sequence
  Description of Artificial Sequence: Synthetic heavy chain variable region CDR H3
STGPPYSYFDSTGYSVVDY

SEQ ID NO: 200 - DNA, 57 bp, Artificial Sequence
  Description of Artificial Sequence: Synthetic heavy chain variable region CDR H3
tccacaggcccaccctattcttactttgatagtactggttattcggtcgtggactac

SEQ ID NO: 201 - DNA, 330 bp, Artificial Sequence
  Description of Artificial Sequence: Synthetic light chain variable region
cagtctgtgttgacgcagccgccctcagcgtctgggacccccgggcagagggtcaccatctcttgttctgcaagcagctccaacatcggagataattatttctactggtaccaacaactcccaggaaaggcccccacactcctcatgtatggtagtgaccagcggtcctcaggggtccctgaccgattctctggctcccagtctggcacctctgcctccctggccatcagtgggctccggtccgaggatgaagctgcttattattgtgcagcttgggatgacagcctgagtggtccggtgttcggcggaggcacccagctgaccgtcctc

SEQ ID NO: 202 - protein, 110 aa, Artificial Sequence
  Description of Artificial Sequence: Synthetic light chain variable region
QSVLTQPPSASGTPGQRVTISCSASSSNIGDNYFYWYQQLPGKAPTLLMYGSDQRSSGVPDRFSGSQSGTSASLAISGLRSEDEAAYYCAAWDDSLSGPVFGGGTQLTVL

SEQ ID NO: 203 - protein, 13 aa, Artificial Sequence
  Description of Artificial Sequence: Synthetic light chain variable region CDR L1
SASSSNIGDNYFY

SEQ ID NO: 204 - DNA, 39 bp, Artificial Sequence
  Description of Artificial Sequence: Synthetic light chain variable region CDR L1
tctgcaagcagctccaacatcggagataattatttctac

SEQ ID NO: 205 - protein, 7 aa, Artificial Sequence
  Description of Artificial Sequence: Synthetic light chain variable region CDR L2
GSDQRSS

SEQ ID NO: 206 - DNA, 21 bp, Artificial Sequence
  Description of Artificial Sequence: Synthetic light chain variable region CDR L2
ggtagtgaccagcggtcctca

SEQ ID NO: 207 - protein, 11 aa, Artificial Sequence
  Description of Artificial Sequence: Synthetic light chain variable region CDR L3
AAWDDSLSGPV

SEQ ID NO: 208 - DNA, 33 bp, Artificial Sequence
  Description of Artificial Sequence: Synthetic light chain variable region CDR L3
gcagcttgggatgacagcctgagtggtccggtg

SEQ ID NO: 209 - DNA, 369 bp, Artificial Sequence
  Description of Artificial Sequence: Synthetic heavy chain variable region
gaggtgcagctggtggagtctggggctgaggtgaggaagcctggggcctcagtgaaggtctcctgcaaggcttctggatacatcttcattaactactatatacactgggtgcgacaggcccctggacaaggtcttgagtggatggggtggatcaaccctaacagtggagcctcaaaccacgcacagacgttcgagggcaggatcaccatgaccaccgacacgtccagcaacacagcctacatggagctgagtagactgagagaggacgacacggccgtctattactgtgcgagatcccagcaactgctcgttatcaccgattactccttagactactggggcctgggaaccctggtcaccgtctcctca

SEQ ID NO: 210 - protein, 123 aa, Artificial Sequence
  Description of Artificial Sequence: Synthetic heavy chain variable region
EVQLVESGAEVRKPGASVKVSCKASGYIFINYYIHWVRQAPGQGLEWMGWINPNSGASNHAQTFEGRITMTTDTSSNTAYMELSRLREDDTAVYYCARSQQLLVITDYSLDYWGLGTLVTVSS

SEQ ID NO: 211 - protein, 9 aa, Artificial Sequence
  Description of Artificial Sequence: Synthetic heavy chain variable region CDR H1
YIFINYYIH

SEQ ID NO: 212 - DNA, 27 bp, Artificial Sequence
  Description of Artificial Sequence: Synthetic heavy chain variable region CDR H1
tacatcttcattaactactatatacac

SEQ ID NO: 213 - protein, 17 aa, Artificial Sequence
  Description of Artificial Sequence: Synthetic heavy chain variable region CDR H2
WINPNSGASNHAQTFEG

SEQ ID NO: 214 - DNA, 51 bp, Artificial Sequence
  Description of Artificial Sequence: Synthetic heavy chain variable region CDR H2
tggatcaaccctaacagtggagcctcaaaccacgcacagacgttcgagggc

SEQ ID NO: 215 - protein, 16 aa, Artificial Sequence
  Description of Artificial Sequence: Synthetic heavy chain variable region CDR H3
ARSQQLLVITDYSLDY

SEQ ID NO: 216 - DNA, 48 bp, Artificial Sequence
  Description of Artificial Sequence: Synthetic heavy chain variable region CDR H3
gcgagatcccagcaactgctcgttatcaccgattactccttagactac

SEQ ID NO: 217 - DNA, 324 bp, Artificial Sequence
  Description of Artificial Sequence: Synthetic light chain variable region
tcctctgagctgactcaggaccctgctgtgtctgtggccttgggacagacagtcaggatcacatgccacggagacaccctcagaaactattatccagcctggtaccagcagaagccaggacaggcccctgttcttgtcgtgtctgatagaaacacccggccctcagggatcccagaccgattctctgtctccacctcaggaaacacagcttccttgaccatcactggggctcaggcggaagatgagggtgactattactgtaactgccgcgacagcagtggtcaccggctggtcttcggcggagggaccaagctgaccgtccta

SEQ ID NO: 218 - protein, 108 aa, Artificial Sequence
  Description of Artificial Sequence: Synthetic light chain variable region
SSELTQDPAVSVALGQTVRITCHGDTLRNYYPAWYQQKPGQAPVLVVSDRNTRPSGIPDRFSVSTSGNTASLTITGAQAEDEGDYYCNCRDSSGHRLVFGGGTKLTVL

SEQ ID NO: 219 - protein, 11 aa, Artificial Sequence
  Description of Artificial Sequence: Synthetic light chain variable region CDR L1
HGDTLRNYYPA

SEQ ID NO: 220 - DNA, 33 bp, Artificial Sequence
  Description of Artificial Sequence: Synthetic light chain variable region CDR L1
cacggagacaccctcagaaactattatccagcc

SEQ ID NO: 221 - protein, 7 aa, Artificial Sequence
  Description of Artificial Sequence: Synthetic light chain variable region CDR L2
DRNTRPS

SEQ ID NO: 222 - DNA, 21 bp, Artificial Sequence
  Description of Artificial Sequence: Synthetic light chain variable region CDR L2
gatagaaacacccggccctca

SEQ ID NO: 223 - protein, 11 aa, Artificial Sequence
  Description of Artificial Sequence: Synthetic light chain variable region CDR L3
NCRDSSGHRLV

SEQ ID NO: 224 - DNA, 33 bp, Artificial Sequence
  Description of Artificial Sequence: Synthetic light chain variable region CDR L3
aactgccgcgacagcagtggtcaccggctggtc

SEQ ID NO: 225 - DNA, 378 bp, Artificial Sequence
  Description of Artificial Sequence: Synthetic heavy chain variable region
caggtccagcttgtgcagtctggggctgaggtgaagaagcctgggtcctcggtgaaggtctcctgcgaggcttctggagacaccttcaccagttatgcagtcatctgggtgcgccaggccccaggacaagggcttgagtggatgggaagtatcatccctatctttcaaacaatcaactacgcaccaaagttccaggggagggtcaccctaagcgcggacggatctacgagaacagtctacatggagttgggaagcctgagatcagaggacacggccatatatttctgtgcgaccaagagatactgtactagtcccagctgccatggactctggtacttcaatctctggggccgtggaaccctggtcaccgtctcctca

SEQ ID NO: 226 - protein, 126 aa, Artificial Sequence
  Description of Artificial Sequence: Synthetic heavy chain variable region
QVQLVQSGAEVKKPGSSVKVSCEASGDTFTSYAVIWVRQAPGQGLEWMGSIIPIFQTINYAPKFQGRVTLSADGSTRTVYMELGSLRSEDTAIYFCATKRYCTSPSCHGLWYFNLWGRGTLVTVSS

SEQ ID NO: 227 - protein, 9 aa, Artificial Sequence
  Description of Artificial Sequence: Synthetic heavy chain variable region CDR H1
DTFTSYAVI

SEQ ID NO: 228 - DNA, 27 bp, Artificial Sequence
  Description of Artificial Sequence: Synthetic heavy chain variable region CDR H1
gacaccttcaccagttatgcagtcatc

SEQ ID NO: 229 - protein, 17 aa, Artificial Sequence
  Description of Artificial Sequence: Synthetic heavy chain variable region CDR H2
SIIPIFQTINYAPKFQG

SEQ ID NO: 230 - DNA, 51 bp, Artificial Sequence
  Description of Artificial Sequence: Synthetic heavy chain variable region CDR H2
agtatcatccctatctttcaaacaatcaactacgcaccaaagttccagggg

SEQ ID NO: 231 - protein, 19 aa, Artificial Sequence
  Description of Artificial Sequence: Synthetic heavy chain variable region CDR H3
ATKRYCTSPSCHGLWYFNL

SEQ ID NO: 232 - DNA, 57 bp, Artificial Sequence
  Description of Artificial Sequence: Synthetic heavy chain variable region CDR H3
gcgaccaagagatactgtactagtcccagctgccatggactctggtacttcaatctc

SEQ ID NO: 233 - DNA, 339 bp, Artificial Sequence
  Description of Artificial Sequence: Synthetic light chain variable region
gatattgtgatgacccagtctccactctccctgcccgtcacccctggagagccggcctccatctcctgcaggtctagtaagagcctcttggatagtgatgatggaaacacctatttggactggtacctgcagaagccagggcagtctccacagatcctgatctatatgctttcgcatcgggcctctggagtcccagacaggttcagtggcagtgggtcaggcactgacttcacactgaaaatcagtagggtggaggctgaggatgttggagtttattactgcatgcaacgtgtagagtatccttacagttttggccaggggaccaaggtggagatcaaa

SEQ ID NO: 234 - protein, 113 aa, Artificial Sequence
  Description of Artificial Sequence: Synthetic light chain variable region
DIVMTQSPLSLPVTPGEPASISCRSSKSLLDSDDGNTYLDWYLQKPGQSPQILIYMLSHRASGVPDRFSGSGSGTDFTLKISRVEAEDVGVYYCMQRVEYPYSFGQGTKVEIK

SEQ ID NO: 235 - protein, 17 aa, Artificial Sequence
  Description of Artificial Sequence: Synthetic light chain variable region CDR L1
RSSKSLLDSDDGNTYLD

SEQ ID NO: 236 - DNA, 51 bp, Artificial Sequence
  Description of Artificial Sequence: Synthetic light chain variable region CDR L1
aggtctagtaagagcctcttggatagtgatgatggaaacacctatttggac

SEQ ID NO: 237 - protein, 7 aa, Artificial Sequence
  Description of Artificial Sequence: Synthetic light chain variable region CDR L2
MLSHRAS

SEQ ID NO: 238 - DNA, 21 bp, Artificial Sequence
  Description of Artificial Sequence: Synthetic light chain variable region CDR L2
atgctttcgcatcgggcctct

SEQ ID NO: 239 - protein, 9 aa, Artificial Sequence
  Description of Artificial Sequence: Synthetic light chain variable region CDR L3
MQRVEYPYS

SEQ ID NO: 240 - DNA, 27 bp, Artificial Sequence
  Description of Artificial Sequence: Synthetic light chain variable region CDR L3
atgcaacgtgtagagtatccttacagt

SEQ ID NO: 241 - DNA, 378 bp, Artificial Sequence
  Description of Artificial Sequence: Synthetic heavy chain variable region
cagatcaccttgaaggagtctgggcctaccgtggtgaaacccacacagaccctcacactgacctgcaccttctctgggttctcactcaacactcgtggcatgggtgtggcctggatccgtcagcccccaggaggggccctggagtggcttgcactcgttgattgggatgatgataagcgctacagcccttctctgaggagcaggctcaccatcaccaaagacacgtccaagaaccaggtgctctttacaatgaccaccatggaccccgcggacacagccacgtactactgtgcacacatcggtctttatgatcgtggtggctattacttattctactttgacttttggggccagggaaccctggtcaccgtctcctca

SEQ ID NO: 242 - protein, 126 aa, Artificial Sequence
  Description of Artificial Sequence: Synthetic heavy chain variable region
QITLKESGPTVVKPTQTLTLTCTFSGFSLNTRGMGVAWIRQPPGGALEWLALVDWDDDKRYSPSLRSRLTITKDTSKNQVLFTMTTMDPADTATYYCAHIGLYDRGGYYLFYFDFWGQGTLVTVSS

SEQ ID NO: 243 - protein, 11 aa, Artificial Sequence
  Description of Artificial Sequence: Synthetic heavy chain variable region CDR H1
FSLNTRGMGVA

SEQ ID NO: 244 - DNA, 33 bp, Artificial Sequence
  Description of Artificial Sequence: Synthetic heavy chain variable region CDR H1
ttctcactcaacactcgtggcatgggtgtggcc

SEQ ID NO: 245 - protein, 16 aa, Artificial Sequence
  Description of Artificial Sequence: Synthetic heavy chain variable region CDR H2
LVDWDDDKRYSPSLRS

SEQ ID NO: 246 - DNA, 48 bp, Artificial Sequence
  Description of Artificial Sequence: Synthetic heavy chain variable region CDR H2
ctcgttgattgggatgatgataagcgctacagcccttctctgaggagc

SEQ ID NO: 247 - protein, 18 aa, Artificial Sequence
  Description of Artificial Sequence: Synthetic heavy chain variable region CDR H3
AHIGLYDRGGYYLFYFDF

SEQ ID NO: 248 - DNA, 54 bp, Artificial Sequence
  Description of Artificial Sequence: Synthetic heavy chain variable region CDR H3
gcacacatcggtctttatgatcgtggtggctattacttattctactttgacttt

SEQ ID NO: 249 - DNA, 321 bp, Artificial Sequence
  Description of Artificial Sequence: Synthetic light chain variable region
gatattgtgctgacgcagtctccatcctccctgtctgcgtctgtaggcgacagggtcaccatcacttgccgggcaagtcagagcattgccagctatgtgaattggtttcagcagaaaccagggaaagcccctgtcctcttgatgtttgcttcatccattttgcaaagtggcgtcccgccaaggttccgtggcagtggatctgggacagatttcactctcaccatcaccagtctccagcctgaagattttgcaacttactactgtcaacacacttacaccaccccgtacatttttggccgggggaccaaagtggagatcaaa

SEQ ID NO: 250 - protein, 107 aa, Artificial Sequence
  Description of Artificial Sequence: Synthetic light chain variable region
DIVLTQSPSSLSASVGDRVTITCRASQSIASYVNWFQQKPGKAPVLLMFASSILQSGVPPRFRGSGSGTDFTLTITSLQPEDFATYYCQHTYTTPYIFGRGTKVEIK

SEQ ID NO: 251 - protein, 11 aa, Artificial Sequence
  Description of Artificial Sequence: Synthetic light chain variable region CDR L1
RASQSIASYVN

SEQ ID NO: 252 - DNA, 33 bp, Artificial Sequence
  Description of Artificial Sequence: Synthetic light chain variable region CDR L1
cgggcaagtcagagcattgccagctatgtgaat

SEQ ID NO: 253 - protein, 7 aa, Artificial Sequence
  Description of Artificial Sequence: Synthetic light chain variable region CDR L2
ASSILQS

SEQ ID NO: 254 - DNA, 21 bp, Artificial Sequence
  Description of Artificial Sequence: Synthetic light chain variable region CDR L2
gcttcatccattttgcaaagt

SEQ ID NO: 255 - protein, 9 aa, Artificial Sequence
  Description of Artificial Sequence: Synthetic light chain variable region CDR L3
QHTYTTPYI

SEQ ID NO: 256 - DNA, 27 bp, Artificial Sequence
  Description of Artificial Sequence: Synthetic light chain variable region CDR L3
caacacacttacaccaccccgtacatt

SEQ ID NO: 257 - DNA, 378 bp, Artificial Sequence
  Description of Artificial Sequence: Synthetic heavy chain variable region
caggtccagcttgtgcagtctggtcctacgctggtgaaacccacacagaccctcacgctgacctgcaccttctctggcttctcactcagcactcgtggagtgggtgtgggctggatccgtcagcccccaggaaaggccctggagtgccttggattcacttattgggatggtgatcagttccacagcccatctctgaagaacagactcaccattaccaaggacacctccaaaaaccaggtggtccttagaatgaccaacatggaccctgtggacacggccacctatttctgtgtacacagcgatctctatgatagtggtggttattacttgtactactttgactactggggccagggaaccctggtcaccgtctcctca

SEQ ID NO: 258 - protein, 126 aa, Artificial Sequence
  Description of Artificial Sequence: Synthetic heavy chain variable region
QVQLVQSGPTLVKPTQTLTLTCTFSGFSLSTRGVGVGWIRQPPGKALECLGFTYWDGDQFHSPSLKNRLTITKDTSKNQVVLRMTNMDPVDTATYFCVHSDLYDSGGYYLYYFDYWGQGTLVTVSS

SEQ ID NO: 259 - protein, 11 aa, Artificial Sequence
  Description of Artificial Sequence: Synthetic heavy chain variable region CDR H1
FSLSTRGVGVG

SEQ ID NO: 260 - DNA, 33 bp, Artificial Sequence
  Description of Artificial Sequence: Synthetic heavy chain variable region CDR H1
ttctcactcagcactcgtggagtgggtgtgggc

SEQ ID NO: 261 - protein, 16 aa, Artificial Sequence
  Description of Artificial Sequence: Synthetic heavy chain variable region CDR H2
FTYWDGDQFHSPSLKN

SEQ ID NO: 262 - DNA, 48 bp, Artificial Sequence
  Description of Artificial Sequence: Synthetic heavy chain variable region CDR H2
ttcacttattgggatggtgatcagttccacagcccatctctgaagaac

SEQ ID NO: 263 - protein, 18 aa, Artificial Sequence
  Description of Artificial Sequence: Synthetic heavy chain variable region CDR H3
VHSDLYDSGGYYLYYFDY

SEQ ID NO: 264 - DNA, 54 bp, Artificial Sequence
  Description of Artificial Sequence: Synthetic heavy chain variable region CDR H3
gtacacagcgatctctatgatagtggtggttattacttgtactactttgactac

SEQ ID NO: 265 - DNA, 321 bp, Artificial Sequence
  Description of Artificial Sequence: Synthetic light chain variable region
gacatccagatgacccagtctccatcctccctgtctgcttctgtgggggacagagtcaccatcacttgccgagccagtcagaccattgccagttatttaaattggtatcagcaaagaccaggggaagcccctaaactcttgatctatgctgcttccagtttgcagagtggggtctcatcaagattcagtggcaggggatctgggacagatttcactctcaccatcaatattctacaacctgaggatcttgcaacttacttctgtcaacaggcttactctgccccgtacacttttggccaggggaccaaggtggaaatcaaa

SEQ ID NO: 266 - protein, 107 aa, Artificial Sequence
  Description of Artificial Sequence: Synthetic light chain variable region
DIQMTQSPSSLSASVGDRVTITCRASQTIASYLNWYQQRPGEAPKLLIYAASSLQSGVSSRFSGRGSGTDFTLTINILQPEDLATYFCQQAYSAPYTFGQGTKVEIK

SEQ ID NO: 267 - protein, 11 aa, Artificial Sequence
  Description of Artificial Sequence: Synthetic light chain variable region CDR L1
RASQTIASYLN

SEQ ID NO: 268 - DNA, 33 bp, Artificial Sequence
  Description of Artificial Sequence: Synthetic light chain variable region CDR L1
cgagccagtcagaccattgccagttatttaaat

SEQ ID NO: 269 - protein, 7 aa, Artificial Sequence
  Description of Artificial Sequence: Synthetic light chain variable region CDR L2
AASSLQS

SEQ ID NO: 270 - DNA, 21 bp, Artificial Sequence
  Description of Artificial Sequence: Synthetic light chain variable region CDR L2
gctgcttccagtttgcagagt

SEQ ID NO: 271 - protein, 9 aa, Artificial Sequence
  Description of Artificial Sequence: Synthetic light chain variable region CDR L3
QQAYSAPYT

SEQ ID NO: 272 - DNA, 27 bp, Artificial Sequence
  Description of Artificial Sequence: Synthetic light chain variable region CDR L3
caacaggcttactctgccccgtacact

SEQ ID NO: 273 - DNA, 363 bp, Artificial Sequence
  Description of Artificial Sequence: Synthetic heavy chain variable region
caggtccagctggtacagtctggagctgaggtgaagaagcctggggcctcagtgaaggtctcctgcaaggcttctggttacacctttaccagctatggtaccagctgggtgcgacaggcccctggacaagggcttgagtggatgggatggatcagcgcttacaatggtaacacaaactatgcacagaatctccagggcagagtcaccatgaccacagacacatcaacgagcacatcctacatggagctgaggagcctgagatctgacgacacggccgtgtattactgtgcgagagatgtccccgtcatagcagctggtacaatggactactggggccagggaaccctggtcaccgtctcctca

SEQ ID NO: 274 - protein, 121 aa, Artificial Sequence
  Description of Artificial Sequence: Synthetic heavy chain variable region
QVQLVQSGAEVKKPGASVKVSCKASGYTFTSYGTSWVRQAPGQGLEWMGWISAYNGNTNYAQNLQGRVTMTTDTSTSTSYMELRSLRSDDTAVYYCARDVPVIAAGTMDYWGQGTLVTVSS

SEQ ID NO: 275 - protein, 9 aa, Artificial Sequence
  Description of Artificial Sequence: Synthetic heavy chain variable region CDR H1
YTFTSYGTS

SEQ ID NO: 276 - DNA, 27 bp, Artificial Sequence
  Description of Artificial Sequence: Synthetic heavy chain variable region CDR H1
tacacctttaccagctatggtaccagc

SEQ ID NO: 277 - protein, 17 aa, Artificial Sequence
  Description of Artificial Sequence: Synthetic heavy chain variable region CDR H2
WISAYNGNTNYAQNLQG

SEQ ID NO: 278 - DNA, 51 bp, Artificial Sequence
  Description of Artificial Sequence: Synthetic heavy chain variable region CDR H2
tggatcagcgcttacaatggtaacacaaactatgcacagaatctccagggc

SEQ ID NO: 279 - protein, 14 aa, Artificial Sequence
  Description of Artificial Sequence: Synthetic heavy chain variable region CDR H3
ARDVPVIAAGTMDY

SEQ ID NO: 280 - DNA, 42 bp, Artificial Sequence
  Description of Artificial Sequence: Synthetic heavy chain variable region CDR H3
gcgagagatgtccccgtcatagcagctggtacaatggactac

SEQ ID NO: 281 - DNA, 336 bp, Artificial Sequence
  Description of Artificial Sequence: Synthetic light chain variable region
gatattgtgatgacccagactccactctccctgcccgtcacccttggacagccggcctccatctcctgcaggtctagtcaaagcctcgtatacagtgatggaaacacctacttgaattggtttcagcagaggccaggccaatctccaaggcgcctaatttataaggtttctaatcgggactctggggtcccagacagattcagcggcagtgggtcaggcactgatttcacactgaaaatcagcagggtggaggctgaggatgttggggtttattactgcatgcaaggtccacactggcctcgaacgttcggccaagggaccaaggtggaaatcaaa

SEQ ID NO: 282 - protein, 112 aa, Artificial Sequence
  Description of Artificial Sequence: Synthetic light chain variable region
DIVMTQTPLSLPVTLGQPASISCRSSQSLVYSDGNTYLNWFQQRPGQSPRRLIYKVSNRDSGVPDRFSGSGSGTDFTLKISRVEAEDVGVYYCMQGPHWPRTFGQGTKVEIK

SEQ ID NO: 283 - protein, 16 aa, Artificial Sequence
  Description of Artificial Sequence: Synthetic light chain variable region CDR L1
RSSQSLVYSDGNTYLN

SEQ ID NO: 284 - DNA, 48 bp, Artificial Sequence
  Description of Artificial Sequence: Synthetic light chain variable region CDR L1
aggtctagtcaaagcctcgtatacagtgatggaaacacctacttgaat

SEQ ID NO: 285 - protein, 7 aa, Artificial Sequence
  Description of Artificial Sequence: Synthetic light chain variable region CDR L2
KVSNRDS

SEQ ID NO: 286 - DNA, 21 bp, Artificial Sequence
  Description of Artificial Sequence: Synthetic light chain variable region CDR L2
aaggtttctaatcgggactct

SEQ ID NO: 287 - protein, 9 aa, Artificial Sequence
  Description of Artificial Sequence: Synthetic light chain variable region CDR L3
MQGPHWPRT

SEQ ID NO: 288 - DNA, 27 bp, Artificial Sequence
  Description of Artificial Sequence: Synthetic light chain variable region CDR L3
atgcaaggtccacactggcctcgaacg

SEQ ID NO: 289 - DNA, 372 bp, Artificial Sequence
  Description of Artificial Sequence: Synthetic heavy chain variable region
caggtccagcttgtgcagtctggggctgaggtgaagaagcctggggcctcagtgaaagtctcgtgtgaggcctctgaatacagtttcagtggcgactatgttcactgggtgcgacaggcccctggacaagggcttgagtggatgggttggataaaggctgtcaatggtggcgcgaactacgcacagaagtttcacggcagggtcacaatgaccactgactcgtccaagagcacagtctatttggagatgagcagactgacacctgccgacacggccatttatttttgtgcgaaggatcgggctgcaagtgttcatgtgccagcgggcgcgtttgacctctggggccagggaaccctggtcaccgtctcctca

SEQ ID NO: 290 - protein, 124 aa, Artificial Sequence
  Description of Artificial Sequence: Synthetic heavy chain variable region
QVQLVQSGAEVKKPGASVKVSCEASEYSFSGDYVHWVRQAPGQGLEWMGWIKAVNGGANYAQKFHGRVTMTTDSSKSTVYLEMSRLTPADTAIYFCAKDRAASVHVPAGAFDLWGQGTLVTVSS

SEQ ID NO: 291 - protein, 9 aa, Artificial Sequence
  Description of Artificial Sequence: Synthetic heavy chain variable region CDR H1
YSFSGDYVH

SEQ ID NO: 292 - DNA, 27 bp, Artificial Sequence
  Description of Artificial Sequence: Synthetic heavy chain variable region CDR H1
tacagtttcagtggcgactatgttcac

SEQ ID NO: 293 - protein, 17 aa, Artificial Sequence
  Description of Artificial Sequence: Synthetic heavy chain variable region CDR H2
WIKAVNGGANYAQKFHG

SEQ ID NO: 294 - DNA, 51 bp, Artificial Sequence
  Description of Artificial Sequence: Synthetic heavy chain variable region CDR H2
tggataaaggctgtcaatggtggcgcgaactacgcacagaagtttcacggc

SEQ ID NO: 295 - protein, 17 aa, Artificial Sequence
  Description of Artificial Sequence: Synthetic heavy chain variable region CDR H3
AKDRAASVHVPAGAFDL

SEQ ID NO: 296 - DNA, 51 bp, Artificial Sequence
  Description of Artificial Sequence: Synthetic heavy chain variable region CDR H3
gcgaaggatcgggctgcaagtgttcatgtgccagcgggcgcgtttgacctc

SEQ ID NO: 297 - DNA, 324 bp, Artificial Sequence
  Description of Artificial Sequence: Synthetic light chain variable region
gacatccagatgacccagtctccttcctccctgtctgcatatgtaggagacagagtcagcatcacttgtcgggcaagtcagagcattgacaactttttaaattggtatcggcagagaccagggaaagcccctgaactcctaatctatgctgcctccactttgcaaggtggggtcccatcaaggttcagtggcagtggatctgggacacatttcactctcaccatcagcagtctccagcctgaagattttgccacttactactgtcaacagagtttcactattccttcgatcaccttcggccaagggacacgactggagattaaa

SEQ ID NO: 298 - protein, 108 aa, Artificial Sequence
  Description of Artificial Sequence: Synthetic light chain variable region
DIQMTQSPSSLSAYVGDRVSITCRASQSIDNFLNWYRQRPGKAPELLIYAASTLQGGVPSRFSGSGSGTHFTLTISSLQPEDFATYYCQQSFTIPSITFGQGTRLEIK

SEQ ID NO: 299 - protein, 11 aa, Artificial Sequence
  Description of Artificial Sequence: Synthetic light chain variable region CDR L1
RASQSIDNFLN

SEQ ID NO: 300 - DNA, 33 bp, Artificial Sequence
  Description of Artificial Sequence: Synthetic light chain variable region CDR L1
cgggcaagtcagagcattgacaactttttaaat

SEQ ID NO: 301 - protein, 7 aa, Artificial Sequence
  Description of Artificial Sequence: Synthetic light chain variable region CDR L2
AASTLQG

SEQ ID NO: 302 - DNA, 21 bp, Artificial Sequence
  Description of Artificial Sequence: Synthetic light chain variable region CDR L2
gctgcctccactttgcaaggt

SEQ ID NO: 303 - protein, 10 aa, Artificial Sequence
  Description of Artificial Sequence: Synthetic light chain variable region CDR L3
QQSFTIPSIT

SEQ ID NO: 304 - DNA, 30 bp, Artificial Sequence
  Description of Artificial Sequence: Synthetic light chain variable region CDR L3
caacagagtttcactattccttcgatcacc

SEQ ID NO: 305 - DNA, 378 bp, Artificial Sequence
  Description of Artificial Sequence: Synthetic heavy chain variable region
caggtcaccttgaaggagtctggtcctgcgctggtgagacccaaacagaccctcactctgacctgctccttctccggcttctcactcgacactcaaagaacgggtgtgaattggatccgtcagtccccagggaaggccctggagtggcttgcacggattgattgggatggcaatatttactccagcacctctgtgaggaccaaactcagcatctccaagggcacctccaaaaaccaggtggtccttacaatgaccgacgtggaccctgtggacacagccacctattactgtgcacggactctttactatacttctggtggttattacttgaacctctttgactactggggccaaggaaccctggtcaccgtctcctca

SEQ ID NO: 306 - protein, 126 aa, Artificial Sequence
  Description of Artificial Sequence: Synthetic heavy chain variable region
QVTLKESGPALVRPKQTLTLTCSFSGFSLDTQRTGVNWIRQSPGKALEWLARIDWDGNIYSSTSVRTKLSISKGTSKNQVVLTMTDVDPVDTATYYCARTLYYTSGGYYLNLFDYWGQGTLVTVSS

SEQ ID NO: 307 - protein, 11 aa, Artificial Sequence
  Description of Artificial Sequence: Synthetic heavy chain variable region CDR H1
FSLDTQRTGVN

SEQ ID NO: 308 - DNA, 33 bp, Artificial Sequence
  Description of Artificial Sequence: Synthetic heavy chain variable region CDR H1
ttctcactcgacactcaaagaacgggtgtgaat

SEQ ID NO: 309 - protein, 16 aa, Artificial Sequence
  Description of Artificial Sequence: Synthetic heavy chain variable region CDR H2
RIDWDGNIYSSTSVRT

SEQ ID NO: 310 - DNA, 48 bp, Artificial Sequence
  Description of Artificial Sequence: Synthetic heavy chain variable region CDR H2
cggattgattgggatggcaatatttactccagcacctctgtgaggacc

SEQ ID NO: 311 - protein, 18 aa, Artificial Sequence
  Description of Artificial Sequence: Synthetic heavy chain variable region CDR H3
ARTLYYTSGGYYLNLFDY

SEQ ID NO: 312 - DNA, 54 bp, Artificial Sequence
  Description of Artificial Sequence: Synthetic heavy chain variable region CDR H3
gcacggactctttactatacttctggtggttattacttgaacctctttgactac

SEQ ID NO: 313 - DNA, 321 bp, Artificial Sequence
  Description of Artificial Sequence: Synthetic light chain variable region
gaaattgtaatgacacagtctccaccctccctgtctgcctctgttggggacagagtcaccatcacttgccgggcaagtcagacaattcccagctatgtcaattggtatcagcagatatcagggaaagcccctcgcctcctgatctatgctgcctcacttttgcaaagtggggtcccatcaaggttcagtggcagcggatctgggacagagttcagtctcaccatcagcggtctgcgacctgaggattttggcacttactactgtcaacagagttacagttccactcccactttcggccaggggaccaaggtggaaatcaaa

SEQ ID NO: 314 - protein, 107 aa, Artificial Sequence
  Description of Artificial Sequence: Synthetic light chain variable region
EIVMTQSPPSLSASVGDRVTITCRASQTIPSYVNWYQQISGKAPRLLIYAASLLQSGVPSRFSGSGSGTEFSLTISGLRPEDFGTYYCQQSYSSTPTFGQGTKVEIK

SEQ ID NO: 315 - protein, 11 aa, Artificial Sequence
  Description of Artificial Sequence: Synthetic light chain variable region CDR L1
RASQTIPSYVN

SEQ ID NO: 316 - DNA, 33 bp, Artificial Sequence
  Description of Artificial Sequence: Synthetic light chain variable region CDR L1
cgggcaagtcagacaattcccagctatgtcaat

SEQ ID NO: 317 - protein, 7 aa, Artificial Sequence
  Description of Artificial Sequence: Synthetic light chain variable region CDR L2
AASLLQS

SEQ ID NO: 318 - DNA, 21 bp, Artificial Sequence
  Description of Artificial Sequence: Synthetic light chain variable region CDR L2
gctgcctcacttttgcaaagt

SEQ ID NO: 319 - protein, 9 aa, Artificial Sequence
  Description of Artificial Sequence: Synthetic light chain variable region CDR L3
QQSYSSTPT

SEQ ID NO: 320 - DNA, 27 bp, Artificial Sequence
  Description of Artificial Sequence: Synthetic light chain variable region CDR L3
caacagagttacagttccactcccact

SEQ ID NO: 321 - DNA, 384 bp, Artificial Sequence
  Description of Artificial Sequence: Synthetic heavy chain variable region
caggtgcagctggtggagtctgggggaggcttggtaaagcctggggggtccctgagactctcatgtgcagcctctggattcattttcagtaacgcctggatgagttgggtccgccagtctccagggaaggggctggagtgggttggccgtattaaaaccaaaactgagggtgcgacaacagaccacgctgcacccctgaaaggcagattcaccatctcaagagatgattcgagaaacacactgtatctccaaatggacagcctgacaaccgaggacacagccgtgtatttttgtaccacaggcccaccttatagttactttgacagtactgggtattccatcgttgactactggggccagggaaccctggtcaccgtctcctca

SEQ ID NO: 322 - protein, 128 aa, Artificial Sequence
  Description of Artificial Sequence: Synthetic heavy chain variable region
QVQLVESGGGLVKPGGSLRLSCAASGFIFSNAWMSWVRQSPGKGLEWVGRIKTKTEGATTDHAAPLKGRFTISRDDSRNTLYLQMDSLTTEDTAVYFCTTGPPYSYFDSTGYSIVDYWGQGTLVTVSS

SEQ ID NO: 323 - protein, 9 aa, Artificial Sequence
  Description of Artificial Sequence: Synthetic heavy chain variable region CDR H1
FIFSNAWMS

SEQ ID NO: 324 - DNA, 27 bp, Artificial Sequence
  Description of Artificial Sequence: Synthetic heavy chain variable region CDR H1
ttcattttcagtaacgcctggatgagt

SEQ ID NO: 325 - protein, 19 aa, Artificial Sequence
  Description of Artificial Sequence: Synthetic heavy chain variable region CDR H2
RIKTKTEGATTDHAAPLKG

SEQ ID NO: 326 - DNA, 57 bp, Artificial Sequence
  Description of Artificial Sequence: Synthetic heavy chain variable region CDR H2
cgtattaaaaccaaaactgagggtgcgacaacagaccacgctgcacccctgaaaggc

SEQ ID NO: 327 - protein, 19 aa, Artificial Sequence
  Description of Artificial Sequence: Synthetic heavy chain variable region CDR H3
TTGPPYSYFDSTGYSIVDY

SEQ ID NO: 328 - DNA, 57 bp, Artificial Sequence
  Description of Artificial Sequence: Synthetic heavy chain variable region CDR H3
accacaggcccaccttatagttactttgacagtactgggtattccatcgttgactac

SEQ ID NO: 329 - DNA, 330 bp, Artificial Sequence
  Description of Artificial Sequence: Synthetic light chain variable region
tcttatgagctgacacagccacccgcagcgtctgggacccccgggcagagggtcaccatctcttgttccggaagcagctccaacatcggaagtgagtatgtattgtggtatcagcaggtcccaggaacggcccccaaactcctcatctataatagtcatcagcggccctcaggggtccctgaccgcatttctggctcccggtctggcacctctgcctccctggccatcagtgggctccggtccgaggatgaggctcattattactgtgcatcctgggatgacagcctgagtggtccggttttcggcggagggacccagctgaccgtcctc

SEQ ID NO: 330 - protein, 110 aa, Artificial Sequence
  Description of Artificial Sequence: Synthetic light chain variable region
SYELTQPPAASGTPGQRVTISCSGSSSNIGSEYVLWYQQVPGTAPKLLIYNSHQRPSGVPDRISGSRSGTSASLAISGLRSEDEAHYYCASWDDSLSGPVFGGGTQLTVL

SEQ ID NO: 331 - protein, 13 aa, Artificial Sequence
  Description of Artificial Sequence: Synthetic light chain variable region CDR L1
SGSSSNIGSEYVL

SEQ ID NO: 332 - DNA, 39 bp, Artificial Sequence
  Description of Artificial Sequence: Synthetic light chain variable region CDR L1
tccggaagcagctccaacatcggaagtgagtatgtattg

SEQ ID NO: 333 - protein, 7 aa, Artificial Sequence
  Description of Artificial Sequence: Synthetic light chain variable region CDR L2
NSHQRPS

SEQ ID NO: 334 - DNA, 21 bp, Artificial Sequence
  Description of Artificial Sequence: Synthetic light chain variable region CDR L2
aatagtcatcagcggccctca

SEQ ID NO: 335 - protein, 11 aa, Artificial Sequence
  Description of Artificial Sequence: Synthetic light chain variable region CDR L3
ASWDDSLSGPV

SEQ ID NO: 336 - DNA, 33 bp, Artificial Sequence
  Description of Artificial Sequence: Synthetic light chain variable region CDR L3
gcatcctgggatgacagcctgagtggtccggtt

SEQ ID NO: 337 - DNA, 384 bp, Artificial Sequence
  Description of Artificial Sequence: Synthetic heavy chain variable region
caggtccagcttgtacagtctgggggaggcttggtaaagcctggggggtcccttagactctcatgtgcagcctctggattcactttcagtaacgcctggatgagctgggtccgccaggctccagggaaggggctggactgggttggccgtatcaaaaccaaagctgatggtgggacaagagactacgctgcacccgtgaaaggcagatttaccatctcgagagatgattcagaaaacacgttgtatctgcaaatgaccagcctgaaaaccgaggacacaggcgtgtattactgtagcacaggcccaccctataaatatcatgatagtactggttattcggtcgttgactactggggccagggaaccctggtcactgtctcctca

SEQ ID NO: 338 - protein, 128 aa, Artificial Sequence
  Description of Artificial Sequence: Synthetic heavy chain variable region
QVQLVQSGGGLVKPGGSLRLSCAASGFTFSNAWMSWVRQAPGKGLDWVGRIKTKADGGTRDYAAPVKGRFTISRDDSENTLYLQMTSLKTEDTGVYYCSTGPPYKYHDSTGYSVVDYWGQGTLVTVSS

SEQ ID NO: 339 - protein, 9 aa, Artificial Sequence
  Description of Artificial Sequence: Synthetic heavy chain variable region CDR H1
FTFSNAWMS

SEQ ID NO: 340 - DNA, 27 bp, Artificial Sequence
  Description of Artificial Sequence: Synthetic heavy chain variable region CDR H1
ttcactttcagtaacgcctggatgagc

SEQ ID NO: 341 - protein, 19 aa, Artificial Sequence
  Description of Artificial Sequence: Synthetic heavy chain variable region CDR H2
RIKTKADGGTRDYAAPVKG

SEQ ID NO: 342 - DNA, 57 bp, Artificial Sequence
  Description of Artificial Sequence: Synthetic heavy chain variable region CDR H2
cgtatcaaaaccaaagctgatggtgggacaagagactacgctgcacccgtgaaaggc

SEQ ID NO: 343 - protein, 19 aa, Artificial Sequence
  Description of Artificial Sequence: Synthetic heavy chain variable region CDR H3
STGPPYKYHDSTGYSVVDY

SEQ ID NO: 344 - DNA, 57 bp, Artificial Sequence
  Description of Artificial Sequence: Synthetic heavy chain variable region CDR H3
agcacaggcccaccctataaatatcatgatagtactggttattcggtcgttgactac

SEQ ID NO: 345 - DNA, 330 bp, Artificial Sequence
  Description of Artificial Sequence: Synthetic light chain variable region
tcttatgagctgactcagccaccctcagcgtctgggacccccgggcagagggtcaccatctcctgttctggaggcagctccaacatcggaagtgattatgtatactggtaccagcagctcccaggaacggcccccaaactcctcatctatggtagtagtcagcgaccctcaggggtccctgaccgattctctggctcccagtctggcacctcagcctccctggccatcagtggtctccggtccgaggatgaggctgattattactgtgctatgtgggatgacagcctgaatggtccggtgttcggcggagggaccaagctgaccgtccta

SEQ ID NO: 346 - protein, 110 aa, Artificial Sequence
  Description of Artificial Sequence: Synthetic light chain variable region
SYELTQPPSASGTPGQRVTISCSGGSSNIGSDYVYWYQQLPGTAPKLLIYGSSQRPSGVPDRFSGSQSGTSASLAISGLRSEDEADYYCAMWDDSLNGPVFGGGTKLTVL

SEQ ID NO: 347 - protein, 13 aa, Artificial Sequence
  Description of Artificial Sequence: Synthetic light chain variable region CDR L1
SGGSSNIGSDYVY

SEQ ID NO: 348 - DNA, 39 bp, Artificial Sequence
  Description of Artificial Sequence: Synthetic light chain variable region CDR L1
tctggaggcagctccaacatcggaagtgattatgtatac

SEQ ID NO: 349 - protein, 7 aa, Artificial Sequence
  Description of Artificial Sequence: Synthetic light chain variable region CDR L2
GSSQRPS

SEQ ID NO: 350 - DNA, 21 bp, Artificial Sequence
  Description of Artificial Sequence: Synthetic light chain variable region CDR L2
ggtagtagtcagcgaccctca

SEQ ID NO: 351 - protein, 11 aa, Artificial Sequence
  Description of Artificial Sequence: Synthetic light chain variable region CDR L3
AMWDDSLNGPV

SEQ ID NO: 352 - DNA, 33 bp, Artificial Sequence
  Description of Artificial Sequence: Synthetic light chain variable region CDR L3
gctatgtgggatgacagcctgaatggtccggtg

SEQ ID NO: 353 - DNA, 378 bp, Artificial Sequence
  Description of Artificial Sequence: Synthetic heavy chain variable region
caggtgcagctacagcagtggggcgcaggactgttgaagccttcggagaccctgtccctctcctgcaccgtctctggtggggtcttcggcaattacttttggagttgggtccgccaggccccagggaagggcctggaatggattggagaaatcaatcagattggaaccaccaactacagtccgtccgcgtccctcaagagtcgagtcactatatcagttgacccgtccaggaaccagttctccctgagcctgaggtctgtgaccgccgcggacacggctcggtattactgtacgagatccgaaacttcagattactttgatagtagtggttatgcatttcatatctggggcgaagggacaatggtcaccgtctcttca

SEQ ID NO: 354 - protein, 126 aa, Artificial Sequence
  Description of Artificial Sequence: Synthetic heavy chain variable region
QVQLQQWGAGLLKPSETLSLSCTVSGGVFGNYFWSWVRQAPGKGLEWIGEINQIGTTNYSPSASLKSRVTISVDPSRNQFSLSLRSVTAADTARYYCTRSETSDYFDSSGYAFHIWGEGTMVTVSS

SEQ ID NO: 355 - protein, 9 aa, Artificial Sequence
  Description of Artificial Sequence: Synthetic heavy chain variable region CDR H1
GVFGNYFWS

SEQ ID NO: 356 - DNA, 27 bp, Artificial Sequence
  Description of Artificial Sequence: Synthetic heavy chain variable region CDR H1
ggggtcttcggcaattacttttggagt

SEQ ID NO: 357 - protein, 18 aa, Artificial Sequence
  Description of Artificial Sequence: Synthetic heavy chain variable region CDR H2
EINQIGTTNYSPSASLKS

SEQ ID NO: 358 - DNA, 54 bp, Artificial Sequence
  Description of Artificial Sequence: Synthetic heavy chain variable region CDR H2
gaaatcaatcagattggaaccaccaactacagtccgtccgcgtccctcaagagt

SEQ ID NO: 359 - protein, 18 aa, Artificial Sequence
  Description of Artificial Sequence: Synthetic heavy chain variable region CDR H3
TRSETSDYFDSSGYAFHI

SEQ ID NO: 360 - DNA, 54 bp, Artificial Sequence
  Description of Artificial Sequence: Synthetic heavy chain variable region CDR H3
acgagatccgaaacttcagattactttgatagtagtggttatgcatttcatatc

SEQ ID NO: 361 - DNA, 327 bp, Artificial Sequence
  Description of Artificial Sequence: Synthetic light chain variable region
ctgcctgtgctgactcagcctgcctccgtgtctgggtctcctggacagtcgatcaccatctcctgcagtggaatcagcagtgacggtggtcgctataactatgtgtcctggtaccaacaacacccgggcaaagcccccaaactcctcatctatgatgacagtaattggcctttaggggtttctcatcgcttctctgggtccaagtctggcaacacggcctccctgaccatctctgggctccgggctgaggacgaggcggactattattgcggctcatatacggacaccaacagactcttcggcggaggcacccagctgaccgtcctc

SEQ ID NO: 362 - protein, 109 aa, Artificial Sequence
  Description of Artificial Sequence: Synthetic light chain variable region
LPVLTQPASVSGSPGQSITISCSGISSDGGRYNYVSWYQQHPGKAPKLLIYDDSNWPLGVSHRFSGSKSGNTASLTISGLRAEDEADYYCGSYTDTNRLFGGGTQLTVL

SEQ ID NO: 363 - protein, 14 aa, Artificial Sequence
  Description of Artificial Sequence: Synthetic light chain variable region CDR L1
SGISSDGGRYNYVS

SEQ ID NO: 364 - DNA, 42 bp, Artificial Sequence
  Description of Artificial Sequence: Synthetic light chain variable region CDR L1
agtggaatcagcagtgacggtggtcgctataactatgtgtcc

SEQ ID NO: 365 - protein, 7 aa, Artificial Sequence
  Description of Artificial Sequence: Synthetic light chain variable region CDR L2
DDSNWPL

SEQ ID NO: 366 - DNA, 21 bp, Artificial Sequence
  Description of Artificial Sequence: Synthetic light chain variable region CDR L2
gatgacagtaattggccttta

SEQ ID NO: 367 - protein, 9 aa, Artificial Sequence
  Description of Artificial Sequence: Synthetic light chain variable region CDR L3
GSYTDTNRL

SEQ ID NO: 368 - DNA, 27 bp, Artificial Sequence
  Description of Artificial Sequence: Synthetic light chain variable region CDR L3
ggctcatatacggacaccaacagactc

SEQ ID NO: 369 - DNA, 351 bp, Artificial Sequence
  Description of Artificial Sequence: Synthetic heavy chain variable region
gaggtgcagctggtggagtcggggggaggcgtggtccagcctgggaggtccctgagactctcctgtgcagcctctggattcaccttcagtgaccatgctatgtactgggtccgccaggctccaggcaaagggctagagtgggtggcacttatatcatttgatggaaggaatatatactacgcagactccgtgaagggccgattcaccatctccagagacaattccaagaacacgctgtatctgcagatgaacagcctgagagctgaggacacggctgtctattactgtgcgagagatcaatggctggttcctgactactggggccagggaaccctggtcaccgtctcctca

SEQ ID NO: 370 - protein, 117 aa, Artificial Sequence
  Description of Artificial Sequence: Synthetic heavy chain variable region
EVQLVESGGGVVQPGRSLRLSCAASGFTFSDHAMYWVRQAPGKGLEWVALISFDGRNIYYADSVKGRFTISRDNSKNTLYLQMNSLRAEDTAVYYCARDQWLVPDYWGQGTLVTVSS

SEQ ID NO: 371 - protein, 9 aa, Artificial Sequence
  Description of Artificial Sequence: Synthetic heavy chain variable region CDR H1
FTFSDHAMY

SEQ ID NO: 372 - DNA, 27 bp, Artificial Sequence
  Description of Artificial Sequence: Synthetic heavy chain variable region CDR H1
ttcaccttcagtgaccatgctatgtac

SEQ ID NO: 373 - protein, 17 aa, Artificial Sequence
  Description of Artificial Sequence: Synthetic heavy chain variable region CDR H2
LISFDGRNIYYADSVKG

SEQ ID NO: 374 - DNA, 51 bp, Artificial Sequence
  Description of Artificial Sequence: Synthetic heavy chain variable region CDR H2
cttatatcatttgatggaaggaatatatactacgcagactccgtgaagggc

SEQ ID NO: 375 - protein, 10 aa, Artificial Sequence
  Description of Artificial Sequence: Synthetic heavy chain variable region CDR H3
ARDQWLVPDY

SEQ ID NO: 376 - DNA, 30 bp, Artificial Sequence
  Description of Artificial Sequence: Synthetic heavy chain variable region CDR H3
gcgagagatcaatggctggttcctgactac

SEQ ID NO: 377 - DNA, 327 bp, Artificial Sequence
  Description of Artificial Sequence: Synthetic light chain variable region
ctgcctgtgctgactcagcctgcctccgtgtctgggtctcctggacagtcgatcaccatctcctgcactggaaccagcagtgacgttggtggttataactatgtctcctggtaccaacagcacccaggcaacgcccccaaactcatgatttatgaagtcagtaagcggccctcaggggtccctgatcgcttctctggcttcaagtctggcaacacggcctccctgaccgtctctgggctccaggctgaggatgaggctgattattactgcagctcatatgcaggcagcaacagtgtcttcggaactgggaccaagctcaccgtccta

SEQ ID NO: 378 - protein, 109 aa, Artificial Sequence
  Description of Artificial Sequence: Synthetic light chain variable region
LPVLTQPASVSGSPGQSITISCTGTSSDVGGYNYVSWYQQHPGNAPKLMIYEVSKRPSGVPDRFSGFKSGNTASLTVSGLQAEDEADYYCSSYAGSNSVFGTGTKLTVL

SEQ ID NO: 379 - protein, 14 aa, Artificial Sequence
  Description of Artificial Sequence: Synthetic light chain variable region CDR L1
TGTSSDVGGYNYVS

SEQ ID NO: 380 - DNA, 42 bp, Artificial Sequence
  Description of Artificial Sequence: Synthetic light chain variable region CDR L1
actggaaccagcagtgacgttggtggttataactatgtctcc

SEQ ID NO: 381 - protein, 7 aa, Artificial Sequence
  Description of Artificial Sequence: Synthetic light chain variable region CDR L2
EVSKRPS

SEQ ID NO: 382 - DNA, 21 bp, Artificial Sequence
  Description of Artificial Sequence: Synthetic light chain variable region CDR L2
gaagtcagtaagcggccctca

SEQ ID NO: 383 - protein, 9 aa, Artificial Sequence
  Description of Artificial Sequence: Synthetic light chain variable region CDR L3
SSYAGSNSV

SEQ ID NO: 384 - DNA, 27 bp, Artificial Sequence
  Description of Artificial Sequence: Synthetic light chain variable region CDR L3
agctcatatgcaggcagcaacagtgtc

SEQ ID NO: 385 - DNA, 366 bp, Artificial Sequence
  Description of Artificial Sequence: Synthetic heavy chain variable region
caggtccagctggtgcagtctgggggaggcgtggtccagcctggggggtccctgagactctcctgtgcagcgtatggactcaccttcagggcctatggcatgcactgggtccgccaggctccaggcaaggggctcgagtgggtggcagtgtcatggtatgacggaacaaatgaagtctatgcagactcagtgaagggccgcttcagaatctccagagatgattccaggagcactctatatttgcaaatgaatagtctgagaggcgaggacacggctgtatattactgtgcgacagaaaggatgtgggaggaaaactccagcagcttcggctggtggggccggggaaccctggtcaccgtctcctca

SEQ ID NO: 386 - protein, 122 aa, Artificial Sequence
  Description of Artificial Sequence: Synthetic heavy chain variable region
QVQLVQSGGGVVQPGGSLRLSCAAYGLTFRAYGMHWVRQAPGKGLEWVAVSWYDGTNEVYADSVKGRFRISRDDSRSTLYLQMNSLRGEDTAVYYCATERMWEENSSSFGWWGRGTLVTVSS

SEQ ID NO: 387 - protein, 9 aa, Artificial Sequence
  Description of Artificial Sequence: Synthetic heavy chain variable region CDR H1
LTFRAYGMH

SEQ ID NO: 388 - DNA, 27 bp, Artificial Sequence
  Description of Artificial Sequence: Synthetic heavy chain variable region CDR H1
ctcaccttcagggcctatggcatgcac

SEQ ID NO: 389 - protein, 17 aa, Artificial Sequence
  Description of Artificial Sequence: Synthetic heavy chain variable region CDR H2
VSWYDGTNEVYADSVKG

SEQ ID NO: 390 - DNA, 51 bp, Artificial Sequence
  Description of Artificial Sequence: Synthetic heavy chain variable region CDR H2
gtgtcatggtatgacggaacaaatgaagtctatgcagactcagtgaagggc

SEQ ID NO: 391 - protein, 15 aa, Artificial Sequence
  Description of Artificial Sequence: Synthetic heavy chain variable region CDR H3
ATERMWEENSSSFGW

SEQ ID NO: 392 - DNA, 45 bp, Artificial Sequence
  Description of Artificial Sequence: Synthetic heavy chain variable region CDR H3
gcgacagaaaggatgtgggaggaaaactccagcagcttcggctgg

SEQ ID NO: 393 - DNA, 330 bp, Artificial Sequence
  Description of Artificial Sequence: Synthetic light chain variable region
caggctgtgctgactcagcctgcctccgtgtctgggtctcctggacagtcgatcaccatttcctgcactggaagcagcagtgacgttggtggttctaactttgtctcctggtaccaacaacacccaggcaaagcccccaaactcatggtttatgatgtcaatcatcggccctcagggatttctaatcgcttctctggctccaagtctggcaacacggcctccctgaccatctctgggctccaggctgaggacgaggctgattattactgcacctcatatacaagtagaagctcttatgtcttcggaagtgggaccaaggtgaccgtactt

SEQ ID NO: 394 - protein, 110 aa, Artificial Sequence
  Description of Artificial Sequence: Synthetic light chain variable region
QAVLTQPASVSGSPGQSITISCTGSSSDVGGSNFVSWYQQHPGKAPKLMVYDVNHRPSGISNRFSGSKSGNTASLTISGLQAEDEADYYCTSYTSRSSYVFGSGTKVTVL

SEQ ID NO: 395 - protein, 14 aa, Artificial Sequence
  Description of Artificial Sequence: Synthetic light chain variable region CDR L1
TGSSSDVGGSNFVS

SEQ ID NO: 396 - DNA, 42 bp, Artificial Sequence
  Description of Artificial Sequence: Synthetic light chain variable region CDR L1
actggaagcagcagtgacgttggtggttctaactttgtctcc

SEQ ID NO: 397 - protein, 7 aa, Artificial Sequence
  Description of Artificial Sequence: Synthetic light chain variable region CDR L2
DVNHRPS

SEQ ID NO: 398 - DNA, 21 bp, Artificial Sequence
  Description of Artificial Sequence: Synthetic light chain variable region CDR L2
gatgtcaatcatcggccctca

SEQ ID NO: 399 - protein, 10 aa, Artificial Sequence
  Description of Artificial Sequence: Synthetic light chain variable region CDR L3
TSYTSRSSYV

SEQ ID NO: 400 - DNA, 30 bp, Artificial Sequence
  Description of Artificial Sequence: Synthetic light chain variable region CDR L3
acctcatatacaagtagaagctcttatgtc

SEQ ID NO: 401 - DNA, 363 bp, Artificial Sequence
  Description of Artificial Sequence: Synthetic heavy chain variable region
caggtccagctggtacagtctggaactgaagtgaagaagcctggggcctcagtgaaggtctcctgtaaggcctctgggtacatcttcgaccactttgctatcacctgggtgcgccaggcccctggacaagggcctgagtggatgggatggatcagcgcttataatgggagaacagaggattcagggaaattcccgggcagactcaccctgaccacagaccccgccacgcggacagccttcctggaactgaggggcctgacacctgacgacacggccgtttattactgtgcgcgagatgtcccggtcatgggagccgcatttttggactactggggccagggaaccctggtcaccgtctcctca

SEQ ID NO: 402 - protein, 121 aa, Artificial Sequence
  Description of Artificial Sequence: Synthetic heavy chain variable region
QVQLVQSGTEVKKPGASVKVSCKASGYIFDHFAITWVRQAPGQGPEWMGWISAYNGRTEDSGKFPGRLTLTTDPATRTAFLELRGLTPDDTAVYYCARDVPVMGAAFLDYWGQGTLVTVSS

SEQ ID NO: 403 - protein, 9 aa, Artificial Sequence
  Description of Artificial Sequence: Synthetic heavy chain variable region CDR H1
YIFDHFAIT

SEQ ID NO: 404 - DNA, 27 bp, Artificial Sequence
  Description of Artificial Sequence: Synthetic heavy chain variable region CDR H1
tacatcttcgaccactttgctatcacc

SEQ ID NO: 405 - protein, 17 aa, Artificial Sequence
  Description of Artificial Sequence: Synthetic heavy chain variable region CDR H2
WISAYNGRTEDSGKFPG

SEQ ID NO: 406 - DNA, 51 bp, Artificial Sequence
  Description of Artificial Sequence: Synthetic heavy chain variable region CDR H2
tggatcagcgcttataatgggagaacagaggattcagggaaattcccgggc

SEQ ID NO: 407 - protein, 14 aa, Artificial Sequence
  Description of Artificial Sequence: Synthetic heavy chain variable region CDR H3
ARDVPVMGAAFLDY

SEQ ID NO: 408 - DNA, 42 bp, Artificial Sequence
  Description of Artificial Sequence: Synthetic heavy chain variable region CDR H3
gcgcgagatgtcccggtcatgggagccgcatttttggactac

SEQ ID NO: 409 - DNA, 336 bp, Artificial Sequence
  Description of Artificial Sequence: Synthetic light chain variable region
gaaattgtattgacacagtctccactctccctgcccgtcactgttggacagccggcctccatctcctgcaggtctggccaaagtctcgaattcagtgatggaaacacctacttgacttggtttcaccagaggccaggccaatctccaaggcgcctaatttataggggttcttaccgggactctggggtccccgacagattccgcggcagtggctcaggcactactttcacactgacaatcagcagggtggaggctgaggatgttgggatttatttctgcatgcaaggtacacactggcctccgaccttcggccaagggaccaaagtggatatcaaa

SEQ ID NO: 410 - protein, 112 aa, Artificial Sequence
  Description of Artificial Sequence: Synthetic light chain variable region
EIVLTQSPLSLPVTVGQPASISCRSGQSLEFSDGNTYLTWFHQRPGQSPRRLIYRGSYRDSGVPDRFRGSGSGTTFTLTISRVEAEDVGIYFCMQGTHWPPTFGQGTKVDIK

SEQ ID NO: 411 - protein, 16 aa, Artificial Sequence
  Description of Artificial Sequence: Synthetic light chain variable region CDR L1
RSGQSLEFSDGNTYLT

SEQ ID NO: 412 - DNA, 48 bp, Artificial Sequence
  Description of Artificial Sequence: Synthetic light chain variable region CDR L1
aggtctggccaaagtctcgaattcagtgatggaaacacctacttgact

SEQ ID NO: 413 - protein, 7 aa, Artificial Sequence
  Description of Artificial Sequence: Synthetic light chain variable region CDR L2
RGSYRDS

SEQ ID NO: 414 - DNA, 21 bp, Artificial Sequence
  Description of Artificial Sequence: Synthetic light chain variable region CDR L2
aggggttcttaccgggactct

SEQ ID NO: 415 - protein, 9 aa, Artificial Sequence
  Description of Artificial Sequence: Synthetic light chain variable region CDR L3
MQGTHWPPT

SEQ ID NO: 416 - DNA, 27 bp, Artificial Sequence
  Description of Artificial Sequence: Synthetic light chain variable region CDR L3
atgcaaggtacacactggcctccgacc

SEQ ID NO: 417 - DNA, 372 bp, Artificial Sequence
  Description of Artificial Sequence: Synthetic heavy chain variable region
caggtccagctggtgcagtctggggctgaggtgaagaagcctggggcctcagtgaaagtctcctgtgaggcctctgcatacagtttcagcggcgactatgttcactgggtgcgacaggcccctggacaagggcttgagtggatgggttggataaaggctgtcaatggtggcgcaaactatgcacagaggtttcacggcagggtcaccatgaccactgactcgtccaggagcacagtctatctggagctgaccaggctgacacctgacgacacggccgtttatttttgtgcgaaagatcgagctgcaagtgttcatgtgccagctggtgagtttgacctctggggccagggaaccctggtcaccgtctcctca

SEQ ID NO: 418 - protein, 124 aa, Artificial Sequence
  Description of Artificial Sequence: Synthetic heavy chain variable region
QVQLVQSGAEVKKPGASVKVSCEASAYSFSGDYVHWVRQAPGQGLEWMGWIKAVNGGANYAQRFHGRVTMTTDSSRSTVYLELTRLTPDDTAVYFCAKDRAASVHVPAGEFDLWGQGTLVTVSS

SEQ ID NO: 419 - protein, 9 aa, Artificial Sequence
  Description of Artificial Sequence: Synthetic heavy chain variable region CDR H1
YSFSGDYVH

SEQ ID NO: 420 - DNA, 27 bp, Artificial Sequence
  Description of Artificial Sequence: Synthetic heavy chain variable region CDR H1
tacagtttcagcggcgactatgttcac

SEQ ID NO: 421 - protein, 17 aa, Artificial Sequence
  Description of Artificial Sequence: Synthetic heavy chain variable region CDR H2
WIKAVNGGANYAQRFHG

SEQ ID NO: 422 - DNA, 51 bp, Artificial Sequence
  Description of Artificial Sequence: Synthetic heavy chain variable region CDR H2
tggataaaggctgtcaatggtggcgcaaactatgcacagaggtttcacggc

SEQ ID NO: 423 - protein, 17 aa, Artificial Sequence
  Description of Artificial Sequence: Synthetic heavy chain variable region CDR H3
AKDRAASVHVPAGEFDL

SEQ ID NO: 424 - DNA, 51 bp, Artificial Sequence
  Description of Artificial Sequence: Synthetic heavy chain variable region CDR H3
gcgaaagatcgagctgcaagtgttcatgtgccagctggtgagtttgacctc

SEQ ID NO: 425 - DNA, 324 bp, Artificial Sequence
  Description of Artificial Sequence: Synthetic light chain variable region
gacatccaggtgacccagtctccttcctccctgtctgcatctgtaggagacagagtcagcatcacttgtcgggcaagtcagagcattagcaactttttaaattggtatcggcagagaccagggaaagcccctgagctcctaatctatgctgcctccactttgcaaggtggggtcccatcaaggttcagtggcagtggatctgggacacatttcactctcaccatcagcagtctccagcctgaagattttgcaacttactactgtcaacagagttacactattccttcgatcaccttcggccaagggacacgactggagattaaa

SEQ ID NO: 426 - protein, 108 aa, Artificial Sequence
  Description of Artificial Sequence: Synthetic light chain variable region
DIQVTQSPSSLSASVGDRVSITCRASQSISNFLNWYRQRPGKAPELLIYAASTLQGGVPSRFSGSGSGTHFTLTISSLQPEDFATYYCQQSYTIPSITFGQGTRLEIK

SEQ ID NO: 427 - protein, 11 aa, Artificial Sequence
  Description of Artificial Sequence: Synthetic light chain variable region CDR L1
RASQSISNFLN

SEQ ID NO: 428 - DNA, 33 bp, Artificial Sequence
  Description of Artificial Sequence: Synthetic light chain variable region CDR L1
cgggcaagtcagagcattagcaactttttaaat

SEQ ID NO: 429 - protein, 7 aa, Artificial Sequence
  Description of Artificial Sequence: Synthetic light chain variable region CDR L2
AASTLQG

SEQ ID NO: 430 - DNA, 21 bp, Artificial Sequence
  Description of Artificial Sequence: Synthetic light chain variable region CDR L2
gctgcctccactttgcaaggt

SEQ ID NO: 431 - protein, 10 aa, Artificial Sequence
  Description of Artificial Sequence: Synthetic light chain variable region CDR L3
QQSYTIPSIT

SEQ ID NO: 432 - DNA, 30 bp, Artificial Sequence
  Description of Artificial Sequence: Synthetic light chain variable region CDR L3
caacagagttacactattccttcgatcacc

SEQ ID NO: 433 - DNA, 366 bp, Artificial Sequence
  Description of Artificial Sequence: Synthetic heavy chain variable region
caggtgcagctgttggagtcgggcgcaggacttttgaagccttcggagaccctgtccctcacctgctctttgtctggtgggtccttcagagacttctactgggcctggattcgccaggcccccgggagggggctggagtggattggggacatcaatgacggtggaaacaccaaccacagtccgtccctcaagagtcgagccatcctttccatagacgcgtccaagaggcagttctccctgagactgacctctgtgaccgccgcggacacggctgtttattattgcgcgagacagaggctcgaacacacggcatctggatattacatggacgtctggggcaacgggaccacggtcaccgtctcctca

SEQ ID NO: 434 - protein, 122 aa, Artificial Sequence
  Description of Artificial Sequence: Synthetic heavy chain variable region
QVQLLESGAGLLKPSETLSLTCSLSGGSFRDFYWAWIRQAPGRGLEWIGDINDGGNTNHSPSLKSRAILSIDASKRQFSLRLTSVTAADTAVYYCARQRLEHTASGYYMDVWGNGTTVTVSS

SEQ ID NO: 435 - protein, 9 aa, Artificial Sequence
  Description of Artificial Sequence: Synthetic heavy chain variable region CDR H1
GSFRDFYWA

SEQ ID NO: 436 - DNA, 27 bp, Artificial Sequence
  Description of Artificial Sequence: Synthetic heavy chain variable region CDR H1
gggtccttcagagacttctactgggcc

SEQ ID NO: 437 - protein, 16 aa, Artificial Sequence
  Description of Artificial Sequence: Synthetic heavy chain variable region CDR H2
DINDGGNTNHSPSLKS

SEQ ID NO: 438 - DNA, 48 bp, Artificial Sequence
  Description of Artificial Sequence: Synthetic heavy chain variable region CDR H2
gacatcaatgacggtggaaacaccaaccacagtccgtccctcaagagt

SEQ ID NO: 439 - protein, 16 aa, Artificial Sequence
  Description of Artificial Sequence: Synthetic heavy chain variable region CDR H3
ARQRLEHTASGYYMDV

SEQ ID NO: 440 - DNA, 48 bp, Artificial Sequence
  Description of Artificial Sequence: Synthetic heavy chain variable region CDR H3
gcgagacagaggctcgaacacacggcatctggatattacatggacgtc

SEQ ID NO: 441 - DNA, 324 bp, Artificial Sequence
  Description of Artificial Sequence: Synthetic light chain variable region
cagtctgtcctgacgcagccgccctcggtgtcagtggacccaggagagacggccaccattacctgtggcggagccaacattggttctaaaaatgtctactggtatcagcagaggccaggccaggcccctgtgctggtcgtctatgatgatatcgaccggcccgcagggatccctgatcgattcactgactctagttctgggaacacggtcaccctgaccatctacagcgtcgaggccgtggatgaggccgactatttctgtcaggtgtgggataattcttctgatcagccggtgttcggcggagggaccaagctcaccgtcctc

SEQ ID NO: 442 - protein, 108 aa, Artificial Sequence
  Description of Artificial Sequence: Synthetic light chain variable region
QSVLTQPPSVSVDPGETATITCGGANIGSKNVYWYQQRPGQAPVLVVYDDIDRPAGIPDRFTDSSSGNTVTLTIYSVEAVDEADYFCQVWDNSSDQPVFGGGTKLTVL

SEQ ID NO: 443 - protein, 11 aa, Artificial Sequence
  Description of Artificial Sequence: Synthetic light chain variable region CDR L1
GGANIGSKNVY

SEQ ID NO: 444 - DNA, 33 bp, Artificial Sequence
  Description of Artificial Sequence: Synthetic light chain variable region CDR L1
ggcggagccaacattggttctaaaaatgtctac

SEQ ID NO: 445 - protein, 7 aa, Artificial Sequence
  Description of Artificial Sequence: Synthetic light chain variable region CDR L2
DDIDRPA

SEQ ID NO: 446 - DNA, 21 bp, Artificial Sequence
  Description of Artificial Sequence: Synthetic light chain variable region CDR L2
gatgatatcgaccggcccgca

SEQ ID NO: 447 - protein, 11 aa, Artificial Sequence
  Description of Artificial Sequence: Synthetic light chain variable region CDR L3
QVWDNSSDQPV

SEQ ID NO: 448 - DNA, 33 bp, Artificial Sequence
  Description of Artificial Sequence: Synthetic light chain variable region CDR L3
caggtgtgggataattcttctgatcagccggtg

SEQ ID NO: 449 - DNA, 357 bp, Artificial Sequence
  Description of Artificial Sequence: Synthetic heavy chain variable region
caggtccagcttgtgcagtctggagcagaggcgaaaaagcccggggagcctctgaggatctcctgtaagggttctggatacacctttagcagctactggatcagctgggtgcgccagaggcccggggaacgcctggagtggatggggagaattgatccgagtgactcctatgcctactcgagcccgtccttccaaggccacgtcaccttctcagctgacaagtccagcaacactgcctttttgcagtggagcagcctgcaggcctcggacaccgccatctattactgcgcgagacacaaagagaattacgatttttgggatttctggggccagggcacaatggtcaccgtctcttca

SEQ ID NO: 450 - protein, 119 aa, Artificial Sequence
  Description of Artificial Sequence: Synthetic heavy chain variable region
QVQLVQSGAEAKKPGEPLRISCKGSGYTFSSYWISWVRQRPGERLEWMGRIDPSDSYAYSSPSFQGHVTFSADKSSNTAFLQWSSLQASDTAIYYCARHKENYDFWDFWGQGTMVTVSS

SEQ ID NO: 451 - protein, 9 aa, Artificial Sequence
  Description of Artificial Sequence: Synthetic heavy chain variable region CDR H1
YTFSSYWIS

SEQ ID NO: 452 - DNA, 27 bp, Artificial Sequence
  Description of Artificial Sequence: Synthetic heavy chain variable region CDR H1
tacacctttagcagctactggatcagc

SEQ ID NO: 453 - protein, 17 aa, Artificial Sequence
  Description of Artificial Sequence: Synthetic heavy chain variable region CDR H2
RIDPSDSYAYSSPSFQG

SEQ ID NO: 454 - DNA, 51 bp, Artificial Sequence
  Description of Artificial Sequence: Synthetic heavy chain variable region CDR H2
agaattgatccgagtgactcctatgcctactcgagcccgtccttccaaggc

SEQ ID NO: 455 - protein, 12 aa, Artificial Sequence
  Description of Artificial Sequence: Synthetic heavy chain variable region CDR H3
ARHKENYDFWDF

SEQ ID NO: 456 - DNA, 36 bp, Artificial Sequence
  Description of Artificial Sequence: Synthetic heavy chain variable region CDR H3
gcgagacacaaagagaattacgatttttgggatttc

SEQ ID NO: 457 - DNA, 336 bp, Artificial Sequence
  Description of Artificial Sequence: Synthetic light chain variable region
gaaacgacactcacgcagtctccagactccctggctgtgtccctgggcgagagggccaccatcaactgcaggtccagccagcctattttgttcaaccccatcaataaactctccttagcttggtaccagctcaaaccaggacagcctcctaagctgctcatttcctgggcatctacccgggaacccggggtccctgaccgattcaatggcagcgggtctgggacagttttcactctcaccatcagcagcctgcagcctgaagatgtggcagtttatgtctgtcagcaatattttactagtacttttttcggccctgggaccaaggtggaaatcaaa

SEQ ID NO: 458 - protein, 112 aa, Artificial Sequence
  Description of Artificial Sequence: Synthetic light chain variable region
ETTLTQSPDSLAVSLGERATINCRSSQPILFNPINKLSLAWYQLKPGQPPKLLISWASTREPGVPDRFNGSGSGTVFTLTISSLQPEDVAVYVCQQYFTSTFFGPGTKVEIK

SEQ ID NO: 459 - protein, 17 aa, Artificial Sequence
  Description of Artificial Sequence: Synthetic light chain variable region CDR L1
RSSQPILFNPINKLSLA

SEQ ID NO: 460 - DNA, 51 bp, Artificial Sequence
  Description of Artificial Sequence: Synthetic light chain variable region CDR L1
aggtccagccagcctattttgttcaaccccatcaataaactctccttagct

SEQ ID NO: 461 - protein, 7 aa, Artificial Sequence
  Description of Artificial Sequence: Synthetic light chain variable region CDR L2
WASTREP

SEQ ID NO: 462 - DNA, 21 bp, Artificial Sequence
  Description of Artificial Sequence: Synthetic light chain variable region CDR L2
tgggcatctacccgggaaccc

SEQ ID NO: 463 - protein, 8 aa, Artificial Sequence
  Description of Artificial Sequence: Synthetic light chain variable region CDR L3
QQYFTSTF

SEQ ID NO: 464 - DNA, 24 bp, Artificial Sequence
  Description of Artificial Sequence: Synthetic light chain variable region CDR L3
cagcaatattttactagtactttt

SEQ ID NO: 465 - DNA, 366 bp, Artificial Sequence
  Description of Artificial Sequence: Synthetic heavy chain variable region
gaggtgcagctgttggagtctggaagtgaggtgaagaagcctgggacctcagtgaaggtctcctgcgagacttctggttacatctttaccaactatgctatctcctgggtgcgacaggcccctggacagggtcttgagtggctgggttggatcagtggttacaatggtcagacctactatgcgcagaaggtccagggtagactcaccctgaccacagacacgtccacgatgacagcctacatggacctgacgagccttagatctgacgacacggccatttattattgtgtgagagatgtccccgtgatttcaggcgcttccacaatggactactggggccagggaaccctggtcaccgtctcctca

SEQ ID NO: 466 - protein, 122 aa, Artificial Sequence
  Description of Artificial Sequence: Synthetic heavy chain variable region
EVQLLESGSEVKKPGTSVKVSCETSGYIFTNYAISWVRQAPGQGLEWLGWISGYNGQTYYAQKVQGRLTLTTDTSTMTAYMDLTSLRSDDTAIYYCVRDVPVISGASTMDYWGQGTLVTVSS

SEQ ID NO: 467 - protein, 9 aa, Artificial Sequence
  Description of Artificial Sequence: Synthetic heavy chain variable region CDR H1
YIFTNYAIS

SEQ ID NO: 468 - DNA, 27 bp, Artificial Sequence
  Description of Artificial Sequence: Synthetic heavy chain variable region CDR H1
tacatctttaccaactatgctatctcc

SEQ ID NO: 469 - protein, 17 aa, Artificial Sequence
  Description of Artificial Sequence: Synthetic heavy chain variable region CDR H2
WISGYNGQTYYAQKVQG

SEQ ID NO: 470 - DNA, 51 bp, Artificial Sequence
  Description of Artificial Sequence: Synthetic heavy chain variable region CDR H2
tggatcagtggttacaatggtcagacctactatgcgcagaaggtccagggt

SEQ ID NO: 471 - protein, 15 aa, Artificial Sequence
  Description of Artificial Sequence: Synthetic heavy chain variable region CDR H3
VRDVPVISGASTMDY

SEQ ID NO: 472 - DNA, 45 bp, Artificial Sequence
  Description of Artificial Sequence: Synthetic heavy chain variable region CDR H3
gtgagagatgtccccgtgatttcaggcgcttccacaatggactac

SEQ ID NO: 473 - DNA, 336 bp, Artificial Sequence
  Description of Artificial Sequence: Synthetic light chain variable region
gatattgtgatgacgcagtctccactctccctgcccgtcacccatggacagccggcctccatctcctgcaggtctagtcaaagcctcgtttacagcgatggaaacacctacttgagttggtttcagctgaggccaggccaatctccaaggcgcctaatttataaggtttctaaccgggactctggggtcccagacagattcagcggcagtgggtcaggcactgatttcacactgaaaatcagccgggtggaggctgaggatgttggagtttattactgcatgcaagctacacagtggcctcgaacgttcggccaagggaccaaggtggagatcaaa

SEQ ID NO: 474 - protein, 112 aa, Artificial Sequence
  Description of Artificial Sequence: Synthetic light chain variable region
DIVMTQSPLSLPVTHGQPASISCRSSQSLVYSDGNTYLSWFQLRPGQSPRRLIYKVSNRDSGVPDRFSGSGSGTDFTLKISRVEAEDVGVYYCMQATQWPRTFGQGTKVEIK

SEQ ID NO: 475 - protein, 16 aa, Artificial Sequence
  Description of Artificial Sequence: Synthetic light chain variable region CDR L1
RSSQSLVYSDGNTYLS

SEQ ID NO: 476 - DNA, 48 bp, Artificial Sequence
  Description of Artificial Sequence: Synthetic light chain variable region CDR L1
aggtctagtcaaagcctcgtttacagcgatggaaacacctacttgagt

SEQ ID NO: 477 - protein, 7 aa, Artificial Sequence
  Description of Artificial Sequence: Synthetic light chain variable region CDR L2
KVSNRDS

SEQ ID NO: 478 - DNA, 21 bp, Artificial Sequence
  Description of Artificial Sequence: Synthetic light chain variable region CDR L2
aaggtttctaaccgggactct

SEQ ID NO: 479 - protein, 9 aa, Artificial Sequence
  Description of Artificial Sequence: Synthetic light chain variable region CDR L3
MQATQWPRT

SEQ ID NO: 480 - DNA, 27 bp, Artificial Sequence
  Description of Artificial Sequence: Synthetic light chain variable region CDR L3
atgcaagctacacagtggcctcgaacg

SEQ ID NO: 481 - DNA, 378 bp, Artificial Sequence
  Description of Artificial Sequence: Synthetic heavy chain variable region
caggtccagcttgtacagtctggtcctacgctggtgaggcccacacagaccctcacgctgacttgcaccttctctgggttctcactctctactcgtggcgtgggcgtgggctgggtccgtcagtccccaggaaaggccccggagttccttgttctcgctcattgggatgatgataagatctacagtccatctctcaggcgcagactctccgtcaccaaggatgtctccaaaaaccaggtggtccttgccttgaccaacgtggaccctgtggacacaggcacatatttctgtgtcaagagcgatctctatgatagaggtggctattacttatattactttgatcattggggtcagggaaccctggtcaccgtctcctca

SEQ ID NO: 482 - protein, 126 aa, Artificial Sequence
  Description of Artificial Sequence: Synthetic heavy chain variable region
QVQLVQSGPTLVRPTQTLTLTCTFSGFSLSTRGVGVGWVRQSPGKAPEFLVLAHWDDDKIYSPSLRRRLSVTKDVSKNQVVLALTNVDPVDTGTYFCVKSDLYDRGGYYLYYFDHWGQGTLVTVSS

SEQ ID NO: 483 - protein, 11 aa, Artificial Sequence
  Description of Artificial Sequence: Synthetic heavy chain variable region CDR H1
FSLSTRGVGVG

SEQ ID NO: 484 - DNA, 33 bp, Artificial Sequence
  Description of Artificial Sequence: Synthetic heavy chain variable region CDR H1
ttctcactctctactcgtggcgtgggcgtgggc

SEQ ID NO: 485 - protein, 16 aa, Artificial Sequence
  Description of Artificial Sequence: Synthetic heavy chain variable region CDR H2
LAHWDDDKIYSPSLRR

SEQ ID NO: 486 - DNA, 48 bp, Artificial Sequence
  Description of Artificial Sequence: Synthetic heavy chain variable region CDR H2
ctcgctcattgggatgatgataagatctacagtccatctctcaggcgc

SEQ ID NO: 487 - protein, 18 aa, Artificial Sequence
  Description of Artificial Sequence: Synthetic heavy chain variable region CDR H3
VKSDLYDRGGYYLYYFDH

SEQ ID NO: 488 - DNA, 54 bp, Artificial Sequence
  Description of Artificial Sequence: Synthetic heavy chain variable region CDR H3
gtcaagagcgatctctatgatagaggtggctattacttatattactttgatcat

SEQ ID NO: 489 - DNA, 321 bp, Artificial Sequence
  Description of Artificial Sequence: Synthetic light chain variable region
gacatccggatgacccagtctccatcctccctgtctgcatctgtgggggacagagtcaccatcacttgccgggcaagtcagaccattgccagttatgtgaattggtatctgcaaagaccaggggaagcccctaaactcctgatctatgcagcttccaatttgcacagtggggccccaccgtcactcattggcaggggctctgggacagatttcactctcaccatcaacactctgcaacctgaacattttggaacttacttctgtcagcagactttctcctctccatacacttttggccaggggaccaaggtggaaatcaaa

SEQ ID NO: 490 - protein, 107 aa, Artificial Sequence
  Description of Artificial Sequence: Synthetic light chain variable region
DIRMTQSPSSLSASVGDRVTITCRASQTIASYVNWYLQRPGEAPKLLIYAASNLHSGAPPSLIGRGSGTDFTLTINTLQPEHFGTYFCQQTFSSPYTFGQGTKVEIK

SEQ ID NO: 491 - protein, 11 aa, Artificial Sequence
  Description of Artificial Sequence: Synthetic light chain variable region CDR L1
RASQTIASYVN

SEQ ID NO: 492 - DNA, 33 bp, Artificial Sequence
  Description of Artificial Sequence: Synthetic light chain variable region CDR L1
cgggcaagtcagaccattgccagttatgtgaat

SEQ ID NO: 493 - protein, 7 aa, Artificial Sequence
  Description of Artificial Sequence: Synthetic light chain variable region CDR L2
AASNLHS

SEQ ID NO: 494 - DNA, 21 bp, Artificial Sequence
  Description of Artificial Sequence: Synthetic light chain variable region CDR L2
gcagcttccaatttgcacagt

SEQ ID NO: 495 - protein, 9 aa, Artificial Sequence
  Description of Artificial Sequence: Synthetic light chain variable region CDR L3
QQTFSSPYT

SEQ ID NO: 496 - DNA, 27 bp, Artificial Sequence
  Description of Artificial Sequence: Synthetic light chain variable region CDR L3
cagcagactttctcctctccatacact

SEQ ID NO: 497 - DNA, 378 bp, Artificial Sequence
  Description of Artificial Sequence: Synthetic heavy chain variable region
caggtgcagctggtggagtctggtcctacgctggtgaagcccacacagaccctcacgctgacctgcaccttctctgggttctcactcactactcgtggcgtgggtgtgggctgggtccgtcagcccccaggaaaggccctggagttccttggactcactcattgggatgatgataagatctacagcccatctctcaggcgcagactcaccatcaccaaggacacctccaaaaaccaggtggtccttgcattggccaacgtggaccctgtggacacagccacatatttctgtgtaaaaagcgatctctatgatagaggtggttattacttatactactttgactattggggtcagggaaccctggtcaccgtctcctca

SEQ ID NO: 498 - protein, 126 aa, Artificial Sequence
  Description of Artificial Sequence: Synthetic heavy chain variable region
QVQLVESGPTLVKPTQTLTLTCTFSGFSLTTRGVGVGWVRQPPGKALEFLGLTHWDDDKIYSPSLRRRLTITKDTSKNQVVLALANVDPVDTATYFCVKSDLYDRGGYYLYYFDYWGQGTLVTVSS

SEQ ID NO: 499 - protein, 11 aa, Artificial Sequence
  Description of Artificial Sequence: Synthetic heavy chain variable region CDR H1
FSLTTRGVGVG

SEQ ID NO: 500 - DNA, 33 bp, Artificial Sequence
  Description of Artificial Sequence: Synthetic heavy chain variable region CDR H1
ttctcactcactactcgtggcgtgggtgtgggc

SEQ ID NO: 501 - protein, 16 aa, Artificial Sequence
  Description of Artificial Sequence: Synthetic heavy chain variable region CDR H2
LTHWDDDKIYSPSLRR

SEQ ID NO: 502 - DNA, 48 bp, Artificial Sequence
  Description of Artificial Sequence: Synthetic heavy chain variable region CDR H2
ctcactcattgggatgatgataagatctacagcccatctctcaggcgc

SEQ ID NO: 503 - protein, 18 aa, Artificial Sequence
  Description of Artificial Sequence: Synthetic heavy chain variable region CDR H3
VKSDLYDRGGYYLYYFDY

SEQ ID NO: 504 - DNA, 54 bp, Artificial Sequence
  Description of Artificial Sequence: Synthetic heavy chain variable region CDR H3
gtaaaaagcgatctctatgatagaggtggttattacttatactactttgactat

SEQ ID NO: 505 - DNA, 321 bp, Artificial Sequence
  Description of Artificial Sequence: Synthetic light chain variable region
gaaattgtgttgacacagtctccatcctccctgtctgcatctgtgggggacagagtcaccatcacttgccgggcaagtcagaccattcccagttatgtaaattggtatctgcaaagaccaggggaagcccctaaactcctgatctatggtgcttccaatttgcacactggggccccaccaacattcattggcaggggatctggggcagatttcactctcaccatcaacactctgcaacctgaacattttggaacctactactgtcaacagactttctcctctccatacacttttggccaggggaccaaggtggaaatcaaa

SEQ ID NO: 506 - protein, 107 aa, Artificial Sequence
  Description of Artificial Sequence: Synthetic light chain variable region
EIVLTQSPSSLSASVGDRVTITCRASQTIPSYVNWYLQRPGEAPKLLIYGASNLHTGAPPTFIGRGSGADFTLTINTLQPEHFGTYYCQQTFSSPYTFGQGTKVEIK

SEQ ID NO: 507 - protein, 11 aa, Artificial Sequence
  Description of Artificial Sequence: Synthetic light chain variable region CDR L1
RASQTIPSYVN

SEQ ID NO: 508 - DNA, 33 bp, Artificial Sequence
  Description of Artificial Sequence: Synthetic light chain variable region CDR L1
cgggcaagtcagaccattcccagttatgtaaat

SEQ ID NO: 509 - protein, 7 aa, Artificial Sequence
  Description of Artificial Sequence: Synthetic light chain variable region CDR L2
GASNLHT

SEQ ID NO: 510 - DNA, 21 bp, Artificial Sequence
  Description of Artificial Sequence: Synthetic light chain variable region CDR L2
ggtgcttccaatttgcacact

SEQ ID NO: 511 - protein, 9 aa, Artificial Sequence
  Description of Artificial Sequence: Synthetic light chain variable region CDR L3
QQTFSSPYT

SEQ ID NO: 512 - DNA, 27 bp, Artificial Sequence
  Description of Artificial Sequence: Synthetic light chain variable region CDR L3
caacagactttctcctctccatacact

SEQ ID NO: 513 - DNA, 378 bp, Artificial Sequence
  Description of Artificial Sequence: Synthetic heavy chain variable region
caggtcaccttgaaggagtctggtcctgcgctggtgaaacccacagagaccctcacactgacctgtaccttctctggcttctcactcagcactaaaagactgagtgtgagttggatccgtcagcccccagggaaggccctggagtggcttgctcgcatagattgggatgatgataaatcttacagcacatctctgaggaccaggctcaccatcgccaaggacacttccaaaaaccaggtcgtccttacaatgaccaacatgggccccgcggacacagccacctatttctgtgttcggtcttctgtatatgctagtaatgcttattacctctactactttgactcttggggccagggaaccctggtcaccgtctcctca

SEQ ID NO: 514 - protein, 126 aa, Artificial Sequence
  Description of Artificial Sequence: Synthetic heavy chain variable region
QVTLKESGPALVKPTETLTLTCTFSGFSLSTKRLSVSWIRQPPGKALEWLARIDWDDDKSYSTSLRTRLTIAKDTSKNQVVLTMTNMGPADTATYFCVRSSVYASNAYYLYYFDSWGQGTLVTVSS

SEQ ID NO: 515 - protein, 11 aa, Artificial Sequence
  Description of Artificial Sequence: Synthetic heavy chain variable region CDR H1
FSLSTKRLSVS

SEQ ID NO: 516 - DNA, 33 bp, Artificial Sequence
  Description of Artificial Sequence: Synthetic heavy chain variable region CDR H1
ttctcactcagcactaaaagactgagtgtgagt

SEQ ID NO: 517 - protein, 16 aa, Artificial Sequence
  Description of Artificial Sequence: Synthetic heavy chain variable region CDR H2
RIDWDDDKSYSTSLRT

SEQ ID NO: 518 - DNA, 48 bp, Artificial Sequence
  Description of Artificial Sequence: Synthetic heavy chain variable region CDR H2
cgcatagattgggatgatgataaatcttacagcacatctctgaggacc

SEQ ID NO: 519 - protein, 18 aa, Artificial Sequence
  Description of Artificial Sequence: Synthetic heavy chain variable region CDR H3
VRSSVYASNAYYLYYFDS

SEQ ID NO: 520 - DNA, 54 bp, Artificial Sequence
  Description of Artificial Sequence: Synthetic heavy chain variable region CDR H3
gttcggtcttctgtatatgctagtaatgcttattacctctactactttgactct

SEQ ID NO: 521 - DNA, 321 bp, Artificial Sequence
  Description of Artificial Sequence: Synthetic light chain variable region
gacatccggatgacccagtctccatcttccctgtctgcatctgtcggagacagagtcaccatcacttgccgggcaagtcagagcattgccacctacttaaattggtatcagcacaaaccagggaaagcccctaccctcctgatctatgctgcatccattttgcacagtggtgtcccgccaaggttcagtggccgtgcctctgggacagatttcactctcaccatcagcagtctgcaacctgaagattttgcaacttactactgtcaacaggcctacagttccccttacacttttggccaggggaccaaagtggatatcaaa

SEQ ID NO: 522 - protein, 107 aa, Artificial Sequence
  Description of Artificial Sequence: Synthetic light chain variable region
DIRMTQSPSSLSASVGDRVTITCRASQSIATYLNWYQHKPGKAPTLLIYAASILHSGVPPRFSGRASGTDFTLTISSLQPEDFATYYCQQAYSSPYTFGQGTKVDIK

SEQ ID NO: 523 - protein, 11 aa, Artificial Sequence
  Description of Artificial Sequence: Synthetic light chain variable region CDR L1
RASQSIATYLN

SEQ ID NO: 524 - DNA, 33 bp, Artificial Sequence
  Description of Artificial Sequence: Synthetic light chain variable region CDR L1
cgggcaagtcagagcattgccacctacttaaat

SEQ ID NO: 525 - protein, 7 aa, Artificial Sequence
  Description of Artificial Sequence: Synthetic light chain variable region CDR L2
AASILHS

SEQ ID NO: 526 - DNA, 21 bp, Artificial Sequence
  Description of Artificial Sequence: Synthetic light chain variable region CDR L2
gctgcatccattttgcacagt

SEQ ID NO: 527 - protein, 9 aa, Artificial Sequence
  Description of Artificial Sequence: Synthetic light chain variable region CDR L3
QQAYSSPYT

SEQ ID NO: 528 - DNA, 27 bp, Artificial Sequence
  Description of Artificial Sequence: Synthetic light chain variable region CDR L3
caacaggcctacagttccccttacact

SEQ ID NO: 529 - DNA, 378 bp, Artificial Sequence
  Description of Artificial Sequence: Synthetic heavy chain variable region
caggtccagctggtgcagtctggggctgaggtgaagaagcctgggtcctcagtgaaggtctcctgcaaggcttctggaggcaccttcggcagctatgctgtcatctgggtgcgacaggcccctggacaagggcttgagtggatgggacatatcatccctgtttttgggacaataaacaacgcacagaagttccagggcagactcacccttagcgcagacgaatccacgggcacagtctacatggggctgagcagcctgagatctgacgacacggccgtgtatttctgtgcgaccaagagatattgtagtgatcccagctgccatggactctggtacttcgatctctggggccgtggcaccctggtcaccgtctcctca

SEQ ID NO: 530 - protein, 126 aa, Artificial Sequence
  Description of Artificial Sequence: Synthetic heavy chain variable region
QVQLVQSGAEVKKPGSSVKVSCKASGGTFGSYAVIWVRQAPGQGLEWMGHIIPVFGTINNAQKFQGRLTLSADESTGTVYMGLSSLRSDDTAVYFCATKRYCSDPSCHGLWYFDLWGRGTLVTVSS

SEQ ID NO: 531 - protein, 9 aa, Artificial Sequence
  Description of Artificial Sequence: Synthetic heavy chain variable region CDR H1
GTFGSYAVI

SEQ ID NO: 532 - DNA, 27 bp, Artificial Sequence
  Description of Artificial Sequence: Synthetic heavy chain variable region CDR H1
ggcaccttcggcagctatgctgtcatc

SEQ ID NO: 533 - protein, 17 aa, Artificial Sequence
  Description of Artificial Sequence: Synthetic heavy chain variable region CDR H2
HIIPVFGTINNAQKFQG

SEQ ID NO: 534 - DNA, 51 bp, Artificial Sequence
  Description of Artificial Sequence: Synthetic heavy chain variable region CDR H2
catatcatccctgtttttgggacaataaacaacgcacagaagttccagggc

SEQ ID NO: 535 - protein, 19 aa, Artificial Sequence
  Description of Artificial Sequence: Synthetic heavy chain variable region CDR H3
ATKRYCSDPSCHGLWYFDL

SEQ ID NO: 536 - DNA, 57 bp, Artificial Sequence; identical to SEQ ID NO: 88
  Description of Artificial Sequence: Synthetic heavy chain variable region CDR H3

SEQ ID NO: 537 - DNA, 339 bp, Artificial Sequence
  Description of Artificial Sequence: Synthetic light chain variable region
gacatccggttgacccagtctccactctccctgcccgtcacccctggagagccggcctccatctcctgcaggtctagtcagagcctcttggatagtgatgatggaaacacctatttggactggtacctgcagaagccagggcagtctccacaggtcctgatctatatgctttcgtatcgggcctctggagtcccagacaggttcagtggcagtgggtcaggcactgatttcacactgaaaatcagcagggtggaggctgaggatgttggagtttattactgcatgcaacgtgcagagtttccttacacttttggccaggggaccaagctggagatcaaa

SEQ ID NO: 538 - protein, 113 aa, Artificial Sequence
  Description of Artificial Sequence: Synthetic light chain variable region
DIRLTQSPLSLPVTPGEPASISCRSSQSLLDSDDGNTYLDWYLQKPGQSPQVLIYMLSYRASGVPDRFSGSGSGTDFTLKISRVEAEDVGVYYCMQRAEFPYTFGQGTKLEIK

SEQ ID NO: 539 - protein, 17 aa, Artificial Sequence
  Description of Artificial Sequence: Synthetic light chain variable region CDR L1
RSSQSLLDSDDGNTYLD

SEQ ID NO: 540 - DNA, 51 bp, Artificial Sequence; identical to SEQ ID NO: 92
  Description of Artificial Sequence: Synthetic light chain variable region CDR L1

SEQ ID NO: 541 - protein, 7 aa, Artificial Sequence
  Description of Artificial Sequence: Synthetic light chain variable region CDR L2
MLSYRAS

SEQ ID NO: 542 - DNA, 21 bp, Artificial Sequence
  Description of Artificial Sequence: Synthetic light chain variable region CDR L2
atgctttcgtatcgggcctct

SEQ ID NO: 543 - protein, 9 aa, Artificial Sequence
  Description of Artificial Sequence: Synthetic light chain variable region CDR L3
MQRAEFPYT

SEQ ID NO: 544 - DNA, 27 bp, Artificial Sequence
  Description of Artificial Sequence: Synthetic light chain variable region CDR L3
atgcaacgtgcagagtttccttacact

SEQ ID NO: 545 - DNA, 357 bp, Artificial Sequence
  Description of Artificial Sequence: Synthetic heavy chain variable region
caggtccagcttgtgcagtctggagcagaggtgaaaaagcccggggagcctctgaggatctcctgtaagggttctggatacacctttaccagctactggatcagttgggtgcgccagatgcccgggacaggccttgagtggatggggagaattgatccgagtgactcctatacctactcgagcccgtccttccaaggccacgtcaccatctcagttgacaagtccatcagcactgcctacctgcaatggagcagcctgaaggcctcggacaccgccatatattactgtgcgagacacaaagagaattacgatttttgggatttttggggccagggaaccctggtcaccgtctcctca

SEQ ID NO: 546 - protein, 119 aa, Artificial Sequence
  Description of Artificial Sequence: Synthetic heavy chain variable region
QVQLVQSGAEVKKPGEPLRISCKGSGYTFTSYWISWVRQMPGTGLEWMGRIDPSDSYTYSSPSFQGHVTISVDKSISTAYLQWSSLKASDTAIYYCARHKENYDFWDFWGQGTLVTVSS

SEQ ID NO: 547 - protein, 9 aa, Artificial Sequence
  Description of Artificial Sequence: Synthetic heavy chain variable region CDR H1
YTFTSYWIS

SEQ ID NO: 548 - DNA, 27 bp, Artificial Sequence
  Description of Artificial Sequence: Synthetic heavy chain variable region CDR H1
tacacctttaccagctactggatcagt

SEQ ID NO: 549 - protein, 17 aa, Artificial Sequence
  Description of Artificial Sequence: Synthetic heavy chain variable region CDR H2
RIDPSDSYTYSSPSFQG

SEQ ID NO: 550 - DNA, 51 bp, Artificial Sequence
  Description of Artificial Sequence: Synthetic heavy chain variable region CDR H2
agaattgatccgagtgactcctatacctactcgagcccgtccttccaaggc

SEQ ID NO: 551 - protein, 12 aa, Artificial Sequence
  Description of Artificial Sequence: Synthetic heavy chain variable region CDR H3
ARHKENYDFWDF

SEQ ID NO: 552 - DNA, 36 bp, Artificial Sequence
  Description of Artificial Sequence: Synthetic heavy chain variable region CDR H3
gcgagacacaaagagaattacgatttttgggatttt

SEQ ID NO: 553 - DNA, 336 bp, Artificial Sequence
  Description of Artificial Sequence: Synthetic light chain variable region
gaaacgacactcacgcagtctccagactccctggctgtgtccctgggcgagagggccaccatcaactgcaagtccagccagactattttcttcaactccaataataagatctccttagcttggtaccagcagaaaccaggacagcctcctaagctgctcatttcctgggcatctacccgcgaatccggggtccctgaccgattcagtggcagcgggtctgggacagatttcactctcaccatcagcagcctgcagcctgaggatgtggcagtttatttctgtcagcaatattatagtagtgcttttttcggccctgggacacgactggagattaaa

SEQ ID NO: 554 - protein, 112 aa, Artificial Sequence
  Description of Artificial Sequence: Synthetic light chain variable region
ETTLTQSPDSLAVSLGERATINCKSSQTIFFNSNNKISLAWYQQKPGQPPKLLISWASTRESGVPDRFSGSGSGTDFTLTISSLQPEDVAVYFCQQYYSSAFFGPGTRLEIK

SEQ ID NO: 555 - protein, 17 aa, Artificial Sequence
  Description of Artificial Sequence: Synthetic light chain variable region CDR L1
KSSQTIFFNSNNKISLA

SEQ ID NO: 556 - DNA, 51 bp, Artificial Sequence
  Description of Artificial Sequence: Synthetic light chain variable region CDR L1
aagtccagccagactattttcttcaactccaataataagatctccttagct

SEQ ID NO: 557 - protein, 7 aa, Artificial Sequence
  Description of Artificial Sequence: Synthetic light chain variable region CDR L2
WASTRES

SEQ ID NO: 558 - DNA, 21 bp, Artificial Sequence
  Description of Artificial Sequence: Synthetic light chain variable region CDR L2
tgggcatctacccgcgaatcc

SEQ ID NO: 559 - protein, 8 aa, Artificial Sequence
  Description of Artificial Sequence: Synthetic light chain variable region CDR L3
QQYYSSAF

SEQ ID NO: 560 - DNA, 24 bp, Artificial Sequence
  Description of Artificial Sequence: Synthetic light chain variable region CDR L3
cagcaatattatagtagtgctttt

SEQ ID NO: 561 - DNA, 363 bp, Artificial Sequence
  Description of Artificial Sequence: Synthetic heavy chain variable region
caggtccagctggtgcagtctggacctgaagtgaagaagcctggggcctcagtgacgatctcctgtcaggcctctgggtacatcttcaatcactactctatcacctgggtgcgacaggcccctggacaagggactgagtggatggggtggatcagcgcctatcacggtaagacggaatattcagggaaattccacggcagagtcaccctgaccacagacacaggcacgcggacagccttcttggaacttagggacctgacatctgacgacacggccatttattattgtgcgcgagatgtcccggtcatgggagccgcatttttggactactggggccagggaaccctggtcaccgtctcctca

SEQ ID NO: 562 - protein, 121 aa, Artificial Sequence
  Description of Artificial Sequence: Synthetic heavy chain variable region
QVQLVQSGPEVKKPGASVTISCQASGYIFNHYSITWVRQAPGQGTEWMGWISAYHGKTEYSGKFHGRVTLTTDTGTRTAFLELRDLTSDDTAIYYCARDVPVMGAAFLDYWGQGTLVTVSS

SEQ ID NO: 563 - protein, 9 aa, Artificial Sequence
  Description of Artificial Sequence: Synthetic heavy chain variable region CDR H1
YIFNHYSIT

SEQ ID NO: 564 - DNA, 27 bp, Artificial Sequence
  Description of Artificial Sequence: Synthetic heavy chain variable region CDR H1
tacatcttcaatcactactctatcacc

SEQ ID NO: 565 - protein, 17 aa, Artificial Sequence
  Description of Artificial Sequence: Synthetic heavy chain variable region CDR H2
WISAYHGKTEYSGKFHG

SEQ ID NO: 566 - DNA, 51 bp, Artificial Sequence
  Description of Artificial Sequence: Synthetic heavy chain variable region CDR H2
tggatcagcgcctatcacggtaagacggaatattcagggaaattccacggc

SEQ ID NO: 567 - protein, 14 aa, Artificial Sequence
  Description of Artificial Sequence: Synthetic heavy chain variable region CDR H3
ARDVPVMGAAFLDY

SEQ ID NO: 568 - DNA, 42 bp, Artificial Sequence; identical to SEQ ID NO: 408
  Description of Artificial Sequence: Synthetic heavy chain variable region CDR H3

SEQ ID NO: 569 - DNA, 336 bp, Artificial Sequence
  Description of Artificial Sequence: Synthetic light chain variable region
gaaattgtgttgacacagtctccactctccctgcccgtcacccttggacagccggcctccatctcctgcaggtctggtcaaagtctcgaattcagtgatggaaacacctacttgacttggtttcagcagaggccaggccaatctccaaggcgcctaatttttaggggttcttaccgggactctggggtccccgaaagattcagcggcagtggctcaggcacttctttcacactgacaatcagcagggtggaggctgaggatgttgggatttatttctgcatgcaaggtacacactggcctccgacgttcggccaagggaccaagctggagatcaaa

SEQ ID NO: 570 - protein, 112 aa, Artificial Sequence
  Description of Artificial Sequence: Synthetic light chain variable region
EIVLTQSPLSLPVTLGQPASISCRSGQSLEFSDGNTYLTWFQQRPGQSPRRLIFRGSYRDSGVPERFSGSGSGTSFTLTISRVEAEDVGIYFCMQGTHWPPTFGQGTKLEIK

SEQ ID NO: 571 - protein, 16 aa, Artificial Sequence
  Description of Artificial Sequence: Synthetic light chain variable region CDR L1
RSGQSLEFSDGNTYLT

SEQ ID NO: 572 - DNA, 48 bp, Artificial Sequence
  Description of Artificial Sequence: Synthetic light chain variable region CDR L1
aggtctggtcaaagtctcgaattcagtgatggaaacacctacttgact

SEQ ID NO: 573 - protein, 7 aa, Artificial Sequence
  Description of Artificial Sequence: Synthetic light chain variable region CDR L2
RGSYRDS

SEQ ID NO: 574 - DNA, 21 bp, Artificial Sequence
  Description of Artificial Sequence: Synthetic light chain variable region CDR L2
aggggttcttaccgggactct

SEQ ID NO: 575 - protein, 9 aa, Artificial Sequence
  Description of Artificial Sequence: Synthetic light chain variable region CDR L3
MQGTHWPPT

SEQ ID NO: 576 - DNA, 27 bp, Artificial Sequence
  Description of Artificial Sequence: Synthetic light chain variable region CDR L3
atgcaaggtacacactggcctccgacg

SEQ ID NO: 577 - DNA, 378 bp, Artificial Sequence
  Description of Artificial Sequence: Synthetic heavy chain variable region
caggtgcagctggtgcagtctggccctgcgctggtgaaacccacgcagaccctcacactgacctgcaccttctctgggttctcactcaccactgcaagaatgtgtgtgagttggatccgtcagcccccagggaaggccctggagtggcttgcacgcattgattgggatgatgataaatcctacagcacatctctgaagaccaggctcaccatcgccaaggacacatccaaaaaccaggtcgtccttaccatgaccaacatgggccccgcggacacagccacttattactgtgtacggactcctatatatgctagtggtggttattacctctcctactttgactcctggggccagggaaccctggtcaccgtctcctca

SEQ ID NO: 578 - protein, 126 aa, Artificial Sequence
  Description of Artificial Sequence: Synthetic heavy chain variable region
QVQLVQSGPALVKPTQTLTLTCTFSGFSLTTARMCVSWIRQPPGKALEWLARIDWDDDKSYSTSLKTRLTIAKDTSKNQVVLTMTNMGPADTATYYCVRTPIYASGGYYLSYFDSWGQGTLVTVSS

SEQ ID NO: 579 - protein, 11 aa, Artificial Sequence
  Description of Artificial Sequence: Synthetic heavy chain variable region CDR H1
FSLTTARMCVS

SEQ ID NO: 580 - DNA, 33 bp, Artificial Sequence
  Description of Artificial Sequence: Synthetic heavy chain variable region CDR H1
ttctcactcaccactgcaagaatgtgtgtgagt

SEQ ID NO: 581 - protein, 16 aa, Artificial Sequence
  Description of Artificial Sequence: Synthetic heavy chain variable region CDR H2
RIDWDDDKSYSTSLKT

SEQ ID NO: 582 - DNA, 48 bp, Artificial Sequence
  Description of Artificial Sequence: Synthetic heavy chain variable region CDR H2
cgcattgattgggatgatgataaatcctacagcacatctctgaagacc

SEQ ID NO: 583 - protein, 18 aa, Artificial Sequence
  Description of Artificial Sequence: Synthetic heavy chain variable region CDR H3
VRTPIYASGGYYLSYFDS

SEQ ID NO: 584 - DNA, 54 bp, Artificial Sequence
  Description of Artificial Sequence: Synthetic heavy chain variable region CDR H3
gtacggactcctatatatgctagtggtggttattacctctcctactttgactcc

SEQ ID NO: 585 - DNA, 321 bp, Artificial Sequence
  Description of Artificial Sequence: Synthetic light chain variable region
gatattgtgatgacgcagtctccatcctccctgtctgcatctgtcggagacagcgtcaccatcacttgccgggcaagtcagactattgccagctatgtgaattggtatcagcacaaaccagggcaagcccctaacctcctgatctatgctgcatccattttgcacagtggggtcccatcaaggttcagaggcggtggctctgggacagatttcactctcaccatcaacagtctgcaacctgaagattttgcaacttactactgtcaacagagttacagtaccccttacacttttggccaggggaccaaagtggatatcaaa

SEQ ID NO: 586 - protein, 107 aa, Artificial Sequence
  Description of Artificial Sequence: Synthetic light chain variable region
DIVMTQSPSSLSASVGDSVTITCRASQTIASYVNWYQHKPGQAPNLLIYAASILHSGVPSRFRGGGSGTDFTLTINSLQPEDFATYYCQQSYSTPYTFGQGTKVDIK

SEQ ID NO: 587 - protein, 11 aa, Artificial Sequence
  Description of Artificial Sequence: Synthetic light chain variable region CDR L1
RASQTIASYVN

SEQ ID NO: 588 - DNA, 33 bp, Artificial Sequence
  Description of Artificial Sequence: Synthetic light chain variable region CDR L1
cgggcaagtcagactattgccagctatgtgaat

SEQ ID NO: 589 - protein, 7 aa, Artificial Sequence
  Description of Artificial Sequence: Synthetic light chain variable region CDR L2
AASILHS

SEQ ID NO: 590 - DNA, 21 bp, Artificial Sequence
  Description of Artificial Sequence: Synthetic light chain variable region CDR L2
gctgcatccattttgcacagt

SEQ ID NO: 591 - protein, 9 aa, Artificial Sequence
  Description of Artificial Sequence: Synthetic light chain variable region CDR L3
QQSYSTPYT

SEQ ID NO: 592 - DNA, 27 bp, Artificial Sequence
  Description of Artificial Sequence: Synthetic light chain variable region CDR L3
caacagagttacagtaccccttacact

SEQ ID NO: 593 - DNA, 378 bp, Artificial Sequence
  Description of Artificial Sequence: Synthetic heavy chain variable region
caggtgcagctggtggagtctggtcctacgctggtgaaacccacacagaccctctcgctgacctgcaccttctctgggttctcactcaccactcgtggagtgggtgtgggctggatccgtcagcccccaggaaaggccctggagtggcttggattcacttattgggatggtgatgaccgctacagcccatctctgaggaacagagtctccatcgccaaggacacctccaaaaaccaggtggtccttacactgaccaacatggaccctgtggacacagccacgtatttttgtgtacacagcgatcgctatgacaggggtggttattacttatacttctttgactactggggcccgggaaccctggtcaccgtctcctca

SEQ ID NO: 594 - protein, 126 aa, Artificial Sequence
  Description of Artificial Sequence: Synthetic heavy chain variable region
QVQLVESGPTLVKPTQTLSLTCTFSGFSLTTRGVGVGWIRQPPGKALEWLGFTYWDGDDRYSPSLRNRVSIAKDTSKNQVVLTLTNMDPVDTATYFCVHSDRYDRGGYYLYFFDYWGPGTLVTVSS

SEQ ID NO: 595 - protein, 11 aa, Artificial Sequence
  Description of Artificial Sequence: Synthetic heavy chain variable region CDR H1
FSLTTRGVGVG

SEQ ID NO: 596 - DNA, 33 bp, Artificial Sequence
  Description of Artificial Sequence: Synthetic heavy chain variable region CDR H1
ttctcactcaccactcgtggagtgggtgtgggc

SEQ ID NO: 597 - protein, 16 aa, Artificial Sequence
  Description of Artificial Sequence: Synthetic heavy chain variable region CDR H2
FTYWDGDDRYSPSLRN

SEQ ID NO: 598 - DNA, 48 bp, Artificial Sequence
  Description of Artificial Sequence: Synthetic heavy chain variable region CDR H2
ttcacttattgggatggtgatgaccgctacagcccatctctgaggaac

SEQ ID NO: 599 - protein, 18 aa, Artificial Sequence
  Description of Artificial Sequence: Synthetic heavy chain variable region CDR H3
VHSDRYDRGGYYLYFFDY

SEQ ID NO: 600 - DNA, 54 bp, Artificial Sequence
  Description of Artificial Sequence: Synthetic heavy chain variable region CDR H3
gtacacagcgatcgctatgacaggggtggttattacttatacttctttgactac

SEQ ID NO: 601 - DNA, 321 bp, Artificial Sequence
  Description of Artificial Sequence: Synthetic light chain variable region
gacatccgagtcacccagtctccatcctccctgtctgcgtctgtgggggacagagtctccatcagttgccgggcaagtcagaccattgccagttatgtaaattggtatcagcagagaccagggaaagcccctcaactcctgatctttgctgcatcccatttgcagactggggtcccatcaagattcagtggcaggggctctgggacagatttcactctcaccatcacctctctgcaacctgaagattttgcaacttactactgtcaacagagttacacttccccgtacacttttggccaggggaccaaggtggaaatcaaa

SEQ ID NO: 602 - protein, 107 aa, Artificial Sequence
  Description of Artificial Sequence: Synthetic light chain variable region
DIRVTQSPSSLSASVGDRVSISCRASQTIASYVNWYQQRPGKAPQLLIFAASHLQTGVPSRFSGRGSGTDFTLTITSLQPEDFATYYCQQSYTSPYTFGQGTKVEIK

SEQ ID NO: 603 - protein, 11 aa, Artificial Sequence
  Description of Artificial Sequence: Synthetic light chain variable region CDR L1
RASQTIASYVN

SEQ ID NO: 604 - DNA, 33 bp, Artificial Sequence
  Description of Artificial Sequence: Synthetic light chain variable region CDR L1
cgggcaagtcagaccattgccagttatgtaaat

SEQ ID NO: 605 - protein, 7 aa, Artificial Sequence
  Description of Artificial Sequence: Synthetic light chain variable region CDR L2
AASHLQT

SEQ ID NO: 606 - DNA, 21 bp, Artificial Sequence
  Description of Artificial Sequence: Synthetic light chain variable region CDR L2
gctgcatcccatttgcagact

SEQ ID NO: 607 - protein, 9 aa, Artificial Sequence
  Description of Artificial Sequence: Synthetic light chain variable region CDR L3
QQSYTSPYT

SEQ ID NO: 608 - DNA, 27 bp, Artificial Sequence
  Description of Artificial Sequence: Synthetic light chain variable region CDR L3
caacagagttacacttccccgtacact

SEQ ID NO: 609 - DNA, 378 bp, Artificial Sequence
  Description of Artificial Sequence: Synthetic heavy chain variable region
gaggtgcagctggtggagtctggtcctacgctggtgaaacccacacagaccctcacgctgacctgctccctctctgggttctcactcaccactcgtggggtgggtgtgggctggatccgccagcccccaggaaaggccccggagtgccttggattcgtttattgggatgatgataaccgctacagcccatctctgaggggcagactcaccatctccaaggacacgtccaagaaccaggtggtccttacactgaccaacatggaccctttggacacagccacctattactgtgttcacagcgatctctatgatagaggtggttattacttattctactttgacgactggggccagggaaccctggtcaccgtctcctca

SEQ ID NO: 610 - protein, 126 aa, Artificial Sequence
  Description of Artificial Sequence: Synthetic heavy chain variable region
EVQLVESGPTLVKPTQTLTLTCSLSGFSLTTRGVGVGWIRQPPGKAPECLGFVYWDDDNRYSPSLRGRLTISKDTSKNQVVLTLTNMDPLDTATYYCVHSDLYDRGGYYLFYFDDWGQGTLVTVSS

SEQ ID NO: 611 - protein, 11 aa, Artificial Sequence
  Description of Artificial Sequence: Synthetic heavy chain variable region CDR H1
FSLTTRGVGVG

SEQ ID NO: 612 - DNA, 33 bp, Artificial Sequence
  Description of Artificial Sequence: Synthetic heavy chain variable region CDR H1
ttctcactcaccactcgtggggtgggtgtgggc

SEQ ID NO: 613 - protein, 16 aa, Artificial Sequence
  Description of Artificial Sequence: Synthetic heavy chain variable region CDR H2
FVYWDDDNRYSPSLRG

SEQ ID NO: 614 - DNA, 48 bp, Artificial Sequence
  Description of Artificial Sequence: Synthetic heavy chain variable region CDR H2
ttcgtttattgggatgatgataaccgctacagcccatctctgaggggc

SEQ ID NO: 615 - protein, 18 aa, Artificial Sequence
  Description of Artificial Sequence: Synthetic heavy chain variable region CDR H3
VHSDLYDRGGYYLFYFDD

SEQ ID NO: 616 - DNA, 54 bp, Artificial Sequence
  Description of Artificial Sequence: Synthetic heavy chain variable region CDR H3
gttcacagcgatctctatgatagaggtggttattacttattctactttgacgac

SEQ ID NO: 617 - DNA, 321 bp, Artificial Sequence
  Description of Artificial Sequence: Synthetic light chain variable region
gacatccaggtgacccagtctccatcctccctgtctgcatctgtgggggacagagtcaccatcacttgccgggcaagtcagcccattgccagttatttaaattggtatcagcagaaaccagggcaagcccctaaactcctcatctatgctgcatccatgttgcagagtggggccccatcaaaattcagtggccggggatctgggacagatttcactctcaccatcaccactctacaacctgaagattttgcaacttactactgtcaacagagttacactttcccgtacacttttggccaggggaccaaggtggaaatcaaa

SEQ ID NO: 618 - protein, 107 aa, Artificial Sequence
  Description of Artificial Sequence: Synthetic light chain variable region
DIQVTQSPSSLSASVGDRVTITCRASQPIASYLNWYQQKPGQAPKLLIYAASMLQSGAPSKFSGRGSGTDFTLTITTLQPEDFATYYCQQSYTFPYTFGQGTKVEIK

SEQ ID NO: 619 - protein, 11 aa, Artificial Sequence
  Description of Artificial Sequence: Synthetic light chain variable region CDR L1
RASQPIASYLN

SEQ ID NO: 620 - DNA, 33 bp, Artificial Sequence
  Description of Artificial Sequence: Synthetic light chain variable region CDR L1
cgggcaagtcagcccattgccagttatttaaat

SEQ ID NO: 621 - protein, 7 aa, Artificial Sequence
  Description of Artificial Sequence: Synthetic light chain variable region CDR L2
AASMLQS

SEQ ID NO: 622 - DNA, 21 bp, Artificial Sequence
  Description of Artificial Sequence: Synthetic light chain variable region CDR L2
gctgcatccatgttgcagagt

SEQ ID NO: 623 - protein, 9 aa, Artificial Sequence
  Description of Artificial Sequence: Synthetic light chain variable region CDR L3
QQSYTFPYT

SEQ ID NO: 624 - DNA, 27 bp, Artificial Sequence
  Description of Artificial Sequence: Synthetic light chain variable region CDR L3
caacagagttacactttcccgtacact

SEQ ID NO: 625 - DNA, 369 bp, Artificial Sequence
  Description of Artificial Sequence: Synthetic heavy chain variable region
gaggtgcagctggtggagtctgggggaggcttggtcaagcctggagggtccctgagactctcctgtgcagcctctggattcaccttcagtgactactacatgagctggatccgccaggctccagggaagggactggagtgggtttcatatattagtattagtagtagttacacagactacgcagactctgtgaagggccgattcaccatctccagagacaacgccaagaactcactgtatctgcaaatgaacagcctgagagccgaggacacggccgtgtattactgtgcgagagatcaacgagaccaagcagtggctggtcggtggttcgacccctggggccagggaaccctggtcaccgtctcctca

SEQ ID NO: 626 - protein, 123 aa, Artificial Sequence
  Description of Artificial Sequence: Synthetic heavy chain variable region
EVQLVESGGGLVKPGGSLRLSCAASGFTFSDYYMSWIRQAPGKGLEWVSYISISSSYTDYADSVKGRFTISRDNAKNSLYLQMNSLRAEDTAVYYCARDQRDQAVAGRWFDPWGQGTLVTVSS

SEQ ID NO: 627 - protein, 9 aa, Artificial Sequence
  Description of Artificial Sequence: Synthetic heavy chain variable region CDR H1
FTFSDYYMS

SEQ ID NO: 628 - DNA, 27 bp, Artificial Sequence
  Description of Artificial Sequence: Synthetic heavy chain variable region CDR H1
ttcaccttcagtgactactacatgagc

SEQ ID NO: 629 - protein, 17 aa, Artificial Sequence
  Description of Artificial Sequence: Synthetic heavy chain variable region CDR H2
YISISSSYTDYADSVKG

SEQ ID NO: 630 - DNA, 51 bp, Artificial Sequence
  Description of Artificial Sequence: Synthetic heavy chain variable region CDR H2
tatattagtattagtagtagttacacagactacgcagactctgtgaagggc

SEQ ID NO: 631 - protein, 16 aa, Artificial Sequence
  Description of Artificial Sequence: Synthetic heavy chain variable region CDR H3
ARDQRDQAVAGRWFDP

SEQ ID NO: 632 - DNA, 48 bp, Artificial Sequence
  Description of Artificial Sequence: Synthetic heavy chain variable region CDR H3
gcgagagatcaacgagaccaagcagtggctggtcggtggttcgacccc

SEQ ID NO: 633 - DNA, 336 bp, Artificial Sequence
  Description of Artificial Sequence: Synthetic light chain variable region
cagtctgtggtgacgcagccgccctcagtgtctggggccccagggcagagggtcaccatctcctgcactgggagcagctccaacatcggggcaggttttgatgtacactggtaccagcaggttccaggaacagcccccaaactcctcatctatgctaacaccaatcggccctcaggggtcccagaccgattctctggctccaagtctggcacctcagcctccctggccatcactgggctcaaggctgaggatgaggctgattattactgccagtcctatgacaacagcctgagtggttcggcggtcttcggcggagggaccaaggtcaccgtccta

SEQ ID NO: 634 - protein, 112 aa, Artificial Sequence
  Description of Artificial Sequence: Synthetic light chain variable region
QSVVTQPPSVSGAPGQRVTISCTGSSSNIGAGFDVHWYQQVPGTAPKLLIYANTNRPSGVPDRFSGSKSGTSASLAITGLKAEDEADYYCQSYDNSLSGSAVFGGGTKVTVL

SEQ ID NO: 635 - protein, 14 aa, Artificial Sequence
  Description of Artificial Sequence: Synthetic light chain variable region CDR L1
TGSSSNIGAGFDVH

SEQ ID NO: 636 - DNA, 42 bp, Artificial Sequence
  Description of Artificial Sequence: Synthetic light chain variable region CDR L1
actgggagcagctccaacatcggggcaggttttgatgtacac

SEQ ID NO: 637 - protein, 7 aa, Artificial Sequence
  Description of Artificial Sequence: Synthetic light chain variable region CDR L2
ANTNRPS

SEQ ID NO: 638 - DNA, 21 bp, Artificial Sequence
  Description of Artificial Sequence: Synthetic light chain variable region CDR L2
gctaacaccaatcggccctca

SEQ ID NO: 639 - protein, 12 aa, Artificial Sequence
  Description of Artificial Sequence: Synthetic light chain variable region CDR L3
QSYDNSLSGSAV

SEQ ID NO: 640 - DNA, 36 bp, Artificial Sequence
  Description of Artificial Sequence: Synthetic light chain variable region CDR L3
cagtcctatgacaacagcctgagtggttcggcggtc

SEQ ID NO: 641 - DNA, 366 bp, Artificial Sequence
  Description of Artificial Sequence: Synthetic heavy chain variable region
caggtgcagctggtgcaatctggttctgaggtgaagcagcctggggcctcagtgaaggtctcctgcaaggcctctggatacaccttcagcgcctaccatctgcactgggtgcgccaggcccccggacaagggcttcagtggctgggcaggatcaaccctaacagtggtgccacaagcgttgcacataactttcagggcagggtcaccttgaccacggacacgtccatcagcacagcctacatggagctgagcagcctgacgtctgacgacagtgccgtgtattactgcgcgagaactatgtggcggtggctggtcgaggggggctttgagaactggggccagggaaccctggtcaccgtctcctca

SEQ ID NO: 642 - protein, 122 aa, Artificial Sequence
  Description of Artificial Sequence: Synthetic heavy chain variable region
QVQLVQSGSEVKQPGASVKVSCKASGYTFSAYHLHWVRQAPGQGLQWLGRINPNSGATSVAHNFQGRVTLTTDTSISTAYMELSSLTSDDSAVYYCARTMWRWLVEGGFENWGQGTLVTVSS

SEQ ID NO: 643 - protein, 9 aa, Artificial Sequence
  Description of Artificial Sequence: Synthetic heavy chain variable region CDR H1
YTFSAYHLH

SEQ ID NO: 644 - DNA, 27 bp, Artificial Sequence
  Description of Artificial Sequence: Synthetic heavy chain variable region CDR H1
tacaccttcagcgcctaccatctgcac

SEQ ID NO: 645 - protein, 17 aa, Artificial Sequence
  Description of Artificial Sequence: Synthetic heavy chain variable region CDR H2
RINPNSGATSVAHNFQG

SEQ ID NO: 646 - DNA, 51 bp, Artificial Sequence
  Description of Artificial Sequence: Synthetic heavy chain variable region CDR H2
aggatcaaccctaacagtggtgccacaagcgttgcacataactttcagggc

SEQ ID NO: 647 - protein, 15 aa, Artificial Sequence
  Description of Artificial Sequence: Synthetic heavy chain variable region CDR H3
ARTMWRWLVEGGFEN

SEQ ID NO: 648 - DNA, 45 bp, Artificial Sequence
  Description of Artificial Sequence: Synthetic heavy chain variable region CDR H3
gcgagaactatgtggcggtggctggtcgaggggggctttgagaac

SEQ ID NO: 649 - DNA, 336 bp, Artificial Sequence
  Description of Artificial Sequence: Synthetic light chain variable region
gacatccggatgacccagtctccactctccctgcccgtcacccctggagagccggcctccatctcctgcaggtctagtcagagcctcctgcatagtaatggagacaactatttggattggtacctgcagaagccagggcagtctccacaggtcctgatctatctgggttctaatcgggcctccggggtccctgacaggttcagtggcagtggatcaggcacagattttacactgaaaatcagcagagtggaggctgaggatgttggggtttattactgcatgcaagctctacaaactccgctcactttcggcggagggaccaaggtggaaatcaaa

SEQ ID NO: 650 - protein, 112 aa, Artificial Sequence
  Description of Artificial Sequence: Synthetic light chain variable region
DIRMTQSPLSLPVTPGEPASISCRSSQSLLHSNGDNYLDWYLQKPGQSPQVLIYLGSNRASGVPDRFSGSGSGTDFTLKISRVEAEDVGVYYCMQALQTPLTFGGGTKVEIK

SEQ ID NO: 651 - protein, 16 aa, Artificial Sequence
  Description of Artificial Sequence: Synthetic light chain variable region CDR L1
RSSQSLLHSNGDNYLD

SEQ ID NO: 652 - DNA, 48 bp, Artificial Sequence
  Description of Artificial Sequence: Synthetic light chain variable region CDR L1
aggtctagtcagagcctcctgcatagtaatggagacaactatttggat

SEQ ID NO: 653 - protein, 7 aa, Artificial Sequence
  Description of Artificial Sequence: Synthetic light chain variable region CDR L2
LGSNRAS

SEQ ID NO: 654 - DNA, 21 bp, Artificial Sequence
  Description of Artificial Sequence: Synthetic light chain variable region CDR L2
ctgggttctaatcgggcctcc

SEQ ID NO: 655 - protein, 9 aa, Artificial Sequence
  Description of Artificial Sequence: Synthetic light chain variable region CDR L3
MQALQTPLT

SEQ ID NO: 656 - DNA, 27 bp, Artificial Sequence
  Description of Artificial Sequence: Synthetic light chain variable region CDR L3
atgcaagctctacaaactccgctcact

SEQ ID NO: 657 - DNA, 363 bp, Artificial Sequence
  Description of Artificial Sequence: Synthetic heavy chain variable region
caggtccagctggtgcagtctggggctgaggtgaagaagccggggtcctcgatgagcatctcctgtcgggcttctggaggctccttcaacaaccaagctatacactggatccgccaggcccctggagaaggacttgagtggatgggaaatatcatccctaatttcggatctcaaaactacgcgccggaattcgtgggcagggtcagcttcaatgcggacgcttccgctggcactgcctacatggacttgagtgatctgacatctcaagacacggccgtctattactgtgcgacagccgggtggttcggggaattggtgcgctttgactcctggggccagggaaccctggtcaccgtctcctca

SEQ ID NO: 658 - protein, 121 aa, Artificial Sequence
  Description of Artificial Sequence: Synthetic heavy chain variable region
QVQLVQSGAEVKKPGSSMSISCRASGGSFNNQAIHWIRQAPGEGLEWMGNIIPNFGSQNYAPEFVGRVSFNADASAGTAYMDLSDLTSQDTAVYYCATAGWFGELVRFDSWGQGTLVTVSS

SEQ ID NO: 659 - protein, 9 aa, Artificial Sequence
  Description of Artificial Sequence: Synthetic heavy chain variable region CDR H1
GSFNNQAIH

SEQ ID NO: 660 - DNA, 27 bp, Artificial Sequence
  Description of Artificial Sequence: Synthetic heavy chain variable region CDR H1
ggctccttcaacaaccaagctatacac

SEQ ID NO: 661 - protein, 17 aa, Artificial Sequence
  Description of Artificial Sequence: Synthetic heavy chain variable region CDR H2
NIIPNFGSQNYAPEFVG

SEQ ID NO: 662 - DNA, 51 bp, Artificial Sequence
  Description of Artificial Sequence: Synthetic heavy chain variable region CDR H2
aatatcatccctaatttcggatctcaaaactacgcgccggaattcgtgggc

SEQ ID NO: 663 - protein, 14 aa, Artificial Sequence
  Description of Artificial Sequence: Synthetic heavy chain variable region CDR H3
ATAGWFGELVRFDS

SEQ ID NO: 664 - DNA, 42 bp, Artificial Sequence
  Description of Artificial Sequence: Synthetic heavy chain variable region CDR H3
gcgacagccgggtggttcggggaattggtgcgctttgactcc

SEQ ID NO: 665 - DNA, 324 bp, Artificial Sequence
  Description of Artificial Sequence: Synthetic light chain variable region
gatattgtgatgacgcagtctccagccaccctgtctgtgtctccagggggaagggccaccctctcctgcagggccagtgagactattaccactaacttagcctggtaccagcagaagcctggccaggctcccaggctcctcatctatggtgcgtccaccagggccactggtatcccagccaggttcagtggcagtgggtcagggacagagttcactctcaccatcaacagcctgcagtctgaggattttgcagtttattactgtcagcagtataataactggcctcctctcactttcggcggagggaccaagctggagatcaaa

SEQ ID NO: 666 - protein, 108 aa, Artificial Sequence
  Description of Artificial Sequence: Synthetic light chain variable region
DIVMTQSPATLSVSPGGRATLSCRASETITTNLAWYQQKPGQAPRLLIYGASTRATGIPARFSGSGSGTEFTLTINSLQSEDFAVYYCQQYNNWPPLTFGGGTKLEIK

SEQ ID NO: 667 - protein, 11 aa, Artificial Sequence
  Description of Artificial Sequence: Synthetic light chain variable region CDR L1
RASETITTNLA

SEQ ID NO: 668 - DNA, 33 bp, Artificial Sequence
  Description of Artificial Sequence: Synthetic light chain variable region CDR L1
agggccagtgagactattaccactaacttagcc

SEQ ID NO: 669 - protein, 7 aa, Artificial Sequence
  Description of Artificial Sequence: Synthetic light chain variable region CDR L2
GASTRAT

SEQ ID NO: 670 - DNA, 21 bp, Artificial Sequence
  Description of Artificial Sequence: Synthetic light chain variable region CDR L2
ggtgcgtccaccagggccact

SEQ ID NO: 671 - protein, 10 aa, Artificial Sequence
  Description of Artificial Sequence: Synthetic light chain variable region CDR L3
QQYNNWPPLT

SEQ ID NO: 672 - DNA, 30 bp, Artificial Sequence; identical to SEQ ID NO: 64
  Description of Artificial Sequence: Synthetic light chain variable region CDR L3

SEQ ID NO: 673 - DNA, 366 bp, Artificial Sequence
  Description of Artificial Sequence: Synthetic heavy chain variable region
caggtgcagctacagcagtggggcgcaggactggtgaagccttcggagaccctgtccctcacctgcgctgtgtctggtgggtccttcaggggttaccagtggaactggttccgccagccccccgggaagggtctggagtggattggggaaatcaatcatggtgaatacacccactacaacgcgtccctcaagagtcgcgtcagtttatctatagacacgtccaagaaccagttctcccttaatctgacctctgtgaccgccgcggacacggctatgtatttttgtgcgagagcctcgagtgggacctataacttcgagtactggttcgacccctggggccagggaaccctggtcaccgtctcctca

SEQ ID NO: 674 - protein, 122 aa, Artificial Sequence
  Description of Artificial Sequence: Synthetic heavy chain variable region
QVQLQQWGAGLVKPSETLSLTCAVSGGSFRGYQWNWFRQPPGKGLEWIGEINHGEYTHYNASLKSRVSLSIDTSKNQFSLNLTSVTAADTAMYFCARASSGTYNFEYWFDPWGQGTLVTVSS

SEQ ID NO: 675 - protein, 9 aa, Artificial Sequence
  Description of Artificial Sequence: Synthetic heavy chain variable region CDR H1
GSFRGYQWN

SEQ ID NO: 676 - DNA, 27 bp, Artificial Sequence
  Description of Artificial Sequence: Synthetic heavy chain variable region CDR H1
gggtccttcaggggttaccagtggaac

SEQ ID NO: 677 - protein, 16 aa, Artificial Sequence
  Description of Artificial Sequence: Synthetic heavy chain variable region CDR H2
EINHGEYTHYNASLKS

SEQ ID NO: 678 - DNA, 48 bp, Artificial Sequence
  Description of Artificial Sequence: Synthetic heavy chain variable region CDR H2
gaaatcaatcatggtgaatacacccactacaacgcgtccctcaagagt

SEQ ID NO: 679 - protein, 16 aa, Artificial Sequence
  Description of Artificial Sequence: Synthetic heavy chain variable region CDR H3
ARASSGTYNFEYWFDP

SEQ ID NO: 680 - DNA, 48 bp, Artificial Sequence
  Description of Artificial Sequence: Synthetic heavy chain variable region CDR H3
gcgagagcctcgagtgggacctataacttcgagtactggttcgacccc

SEQ ID NO: 681 - DNA, 324 bp, Artificial Sequence
  Description of Artificial Sequence: Synthetic light chain variable region
tcctatgtgctgacacagccaccctcggtgtcagtggccccaggaaagacggcctggcttacctgtgggggaaacaacattggaaataaaagagtgcactggtaccagcagaagccaggccaggcccctgtgctggtcgtgtatgatgattacggccggccctcagggacctctgagcgagtctctggctccaactctgggaacacggccaccctgaccatcagcagggtcgaagccggggatgaggccgagtattattgtcaggtgtgggatgatcccagtgatcatgcggtgttcggcggaggcacccagctgaccgtcctc

SEQ ID NO: 682 - protein, 108 aa, Artificial Sequence
  Description of Artificial Sequence: Synthetic light chain variable region
SYVLTQPPSVSVAPGKTAWLTCGGNNIGNKRVHWYQQKPGQAPVLVVYDDYGRPSGTSERVSGSNSGNTATLTISRVEAGDEAEYYCQVWDDPSDHAVFGGGTQLTVL

SEQ ID NO: 683 - protein, 11 aa, Artificial Sequence
  Description of Artificial Sequence: Synthetic light chain variable region CDR L1
GGNNIGNKRVH

SEQ ID NO: 684 - DNA, 33 bp, Artificial Sequence
  Description of Artificial Sequence: Synthetic light chain variable region CDR L1
gggggaaacaacattggaaataaaagagtgcac

SEQ ID NO: 685 - protein, 7 aa, Artificial Sequence
  Description of Artificial Sequence: Synthetic light chain variable region CDR L2
DDYGRPS

SEQ ID NO: 686 - DNA, 21 bp, Artificial Sequence
  Description of Artificial Sequence: Synthetic light chain variable region CDR L2
gatgattacggccggccctca

SEQ ID NO: 687 - protein, 11 aa, Artificial Sequence
  Description of Artificial Sequence: Synthetic light chain variable region CDR L3
QVWDDPSDHAV

SEQ ID NO: 688 - DNA, 33 bp, Artificial Sequence
  Description of Artificial Sequence: Synthetic light chain variable region CDR L3
caggtgtgggatgatcccagtgatcatgcggtg

SEQ ID NO: 689 - DNA, 363 bp, Artificial Sequence
  Description of Artificial Sequence: Synthetic heavy chain variable region
caggtccagctggtgcagtctgggggacgactggtcaagcctggggggtccctgagactctcctgtggaatgtctggattcggcttcagtagttatagaatgaattgggtccgccaggctccagggaagggactggagtggatctcatcgattagtgctagtagtagttatacagactacgcgaattcagtgaagggccgattcaccatctccagagacggcgccaatttgtttctgcaaatgaacagcctgagagtcgaggacacggctgtgtattattgtgcgagagattgggggggacattccatttttggagcggtccaagacctctggggccagggaaccctggtcaccgtctcctca

SEQ ID NO: 690 - protein, 121 aa, Artificial Sequence
  Description of Artificial Sequence: Synthetic heavy chain variable region
QVQLVQSGGRLVKPGGSLRLSCGMSGFGFSSYRMNWVRQAPGKGLEWISSISASSSYTDYANSVKGRFTISRDGANLFLQMNSLRVEDTAVYYCARDWGGHSIFGAVQDLWGQGTLVTVSS

SEQ ID NO: 691 - protein, 9 aa, Artificial Sequence
  Description of Artificial Sequence: Synthetic heavy chain variable region CDR H1
FGFSSYRMN

SEQ ID NO: 692 - DNA, 27 bp, Artificial Sequence
  Description of Artificial Sequence: Synthetic heavy chain variable region CDR H1
ttcggcttcagtagttatagaatgaat

SEQ ID NO: 693 - protein, 17 aa, Artificial Sequence
  Description of Artificial Sequence: Synthetic heavy chain variable region CDR H2
SISASSSYTDYANSVKG

SEQ ID NO: 694 - DNA, 51 bp, Artificial Sequence
  Description of Artificial Sequence: Synthetic heavy chain variable region CDR H2
tcgattagtgctagtagtagttatacagactacgcgaattcagtgaagggc

SEQ ID NO: 695 - protein, 16 aa, Artificial Sequence
  Description of Artificial Sequence: Synthetic heavy chain variable region CDR H3
ARDWGGHSIFGAVQDL

SEQ ID NO: 696 - DNA, 48 bp, Artificial Sequence
  Description of Artificial Sequence: Synthetic heavy chain variable region CDR H3
gcgagagattgggggggacattccatttttggagcggtccaagacctc

SEQ ID NO: 697 - DNA, 330 bp, Artificial Sequence
  Description of Artificial Sequence: Synthetic light chain variable region
cagtctgtgctgacgcagccgccctcagtgtctggggcccctgggcagagggtcaccatctcctgctctgggagcagttccaacatcggggcaggttatgatgtccactggtaccagcagcttccaggaacagcccccaaactcctcatctatggtaacaccaatcggccctcaggggtccctgaccgattctctggctccaagtctggcacgtcagcctccctggccatcactggcctccaggccgaggatgaggctgattattactgccagtcctatgacagaagcctgagtcaggtcttcggagctgggaccaaggtgaccgtccta

SEQ ID NO: 698 - protein, 110 aa, Artificial Sequence
  Description of Artificial Sequence: Synthetic light chain variable region
QSVLTQPPSVSGAPGQRVTISCSGSSSNIGAGYDVHWYQQLPGTAPKLLIYGNTNRPSGVPDRFSGSKSGTSASLAITGLQAEDEADYYCQSYDRSLSQVFGAGTKVTVL

SEQ ID NO: 699 - protein, 14 aa, Artificial Sequence
  Description of Artificial Sequence: Synthetic light chain variable region CDR L1
SGSSSNIGAGYDVH

SEQ ID NO: 700 - DNA, 42 bp, Artificial Sequence
  Description of Artificial Sequence: Synthetic light chain variable region CDR L1
tctgggagcagttccaacatcggggcaggttatgatgtccac

SEQ ID NO: 701 - protein, 7 aa, Artificial Sequence
  Description of Artificial Sequence: Synthetic light chain variable region CDR L2
GNTNRPS

SEQ ID NO: 702 - DNA, 21 bp, Artificial Sequence
  Description of Artificial Sequence: Synthetic light chain variable region CDR L2
ggtaacaccaatcggccctca

SEQ ID NO: 703 - protein, 10 aa, Artificial Sequence
  Description of Artificial Sequence: Synthetic light chain variable region CDR L3
QSYDRSLSQV

SEQ ID NO: 704 - DNA, 30 bp, Artificial Sequence
  Description of Artificial Sequence: Synthetic light chain variable region CDR L3
cagtcctatgacagaagcctgagtcaggtc

SEQ ID NO: 705 - DNA, 378 bp, Artificial Sequence; identical to SEQ ID NO: 305
  Description of Artificial Sequence: Synthetic heavy chain variable region

SEQ ID NO: 706 - protein, 126 aa, Artificial Sequence; identical to SEQ ID NO: 306
  Description of Artificial Sequence: Synthetic heavy chain variable region

SEQ ID NO: 707 - protein, 11 aa, Artificial Sequence
  Description of Artificial Sequence: Synthetic heavy chain variable region CDR H1
FSLDTQRTGVN

SEQ ID NO: 708 - DNA, 33 bp, Artificial Sequence; identical to SEQ ID NO: 308
  Description of Artificial Sequence: Synthetic heavy chain variable region CDR H1

SEQ ID NO: 709 - protein, 16 aa, Artificial Sequence
  Description of Artificial Sequence: Synthetic heavy chain variable region CDR H2
RIDWDGNIYSSTSVRT

SEQ ID NO: 710 - DNA, 48 bp, Artificial Sequence; identical to SEQ ID NO: 310
  Description of Artificial Sequence: Synthetic heavy chain variable region CDR H2

SEQ ID NO: 711 - protein, 18 aa, Artificial Sequence
  Description of Artificial Sequence: Synthetic heavy chain variable region CDR H3
ARTLYYTSGGYYLNLFDY

SEQ ID NO: 712 - DNA, 54 bp, Artificial Sequence; identical to SEQ ID NO: 312
  Description of Artificial Sequence: Synthetic heavy chain variable region CDR H3

SEQ ID NO: 713 - DNA, 321 bp, Artificial Sequence
  Description of Artificial Sequence: Synthetic light chain variable region
gaaattgtgatgacgcagtctccaccctccctgtctgcctctgttggggacagagtcaccatcacttgccgggcaagtcagacaattcccagctatgtcaattggtatcagcagatatcagggaaagcccctcgcctcctgatctatgctgcctcacttttgcaaagtggggtcccatcaaggttcagtggcagcggatctgggacagagttcagtctcaccatcagcggtctgcgacctgaggattttggcacttactactgtcaacagagttacagttccactcccactttcggccaggggacacgactggagattaaa

SEQ ID NO: 714 - protein, 107 aa, Artificial Sequence
  Description of Artificial Sequence: Synthetic light chain variable region
EIVMTQSPPSLSASVGDRVTITCRASQTIPSYVNWYQQISGKAPRLLIYAASLLQSGVPSRFSGSGSGTEFSLTISGLRPEDFGTYYCQQSYSSTPTFGQGTRLEIK

SEQ ID NO: 715 - protein, 11 aa, Artificial Sequence
  Description of Artificial Sequence: Synthetic light chain variable region CDR L1
RASQTIPSYVN

SEQ ID NO: 716 - DNA, 33 bp, Artificial Sequence; identical to SEQ ID NO: 316
  Description of Artificial Sequence: Synthetic light chain variable region CDR L1

SEQ ID NO: 717 - protein, 7 aa, Artificial Sequence
  Description of Artificial Sequence: Synthetic light chain variable region CDR L2
AASLLQS

SEQ ID NO: 718 - DNA, 21 bp, Artificial Sequence
  Description of Artificial Sequence: Synthetic light chain variable region CDR L2
gctgcctcacttttgcaaagt

SEQ ID NO: 719 - protein, 9 aa, Artificial Sequence
  Description of Artificial Sequence: Synthetic light chain variable region CDR L3
QQSYSSTPT

SEQ ID NO: 720 - DNA, 27 bp, Artificial Sequence
  Description of Artificial Sequence: Synthetic light chain variable region CDR L3
caacagagttacagttccactcccact

SEQ ID NO: 721 - DNA, 378 bp, Artificial Sequence
  Description of Artificial Sequence: Synthetic heavy chain variable region
gaggtgcagctggtggagtctggggctgaggtgaagaggcctgggtcctcggtgaaggtctcctgtaaggttgtcggaggcagtttcagcaactatgctatcagctgggtgcgacaggcccctggacaagggcctgagtatctgggagggatcatccccgcctttaggacagcaaaatatgcaaagaaattccaggacagactcacaattaccgcggacgaatctacgagcactgcctacatggaaatgaggggcctgacatctgacgacacgggcctatattattgtgcgaggcctgaaggagactttggggatttgaagtggctacgatcgccctttgactactggggccagggaaccctggtcaccgtctcctca

SEQ ID NO: 722 - protein, 126 aa, Artificial Sequence
  Description of Artificial Sequence: Synthetic heavy chain variable region
EVQLVESGAEVKRPGSSVKVSCKVVGGSFSNYAISWVRQAPGQGPEYLGGIIPAFRTAKYAKKFQDRLTITADESTSTAYMEMRGLTSDDTGLYYCARPEGDFGDLKWLRSPFDYWGQGTLVTVSS

SEQ ID NO: 723 - protein, 9 aa, Artificial Sequence
  Description of Artificial Sequence: Synthetic heavy chain variable region CDR H1
GSFSNYAIS

SEQ ID NO: 724 - DNA, 27 bp, Artificial Sequence
  Description of Artificial Sequence: Synthetic heavy chain variable region CDR H1
ggcagtttcagcaactatgctatcagc

SEQ ID NO: 725 - protein, 17 aa, Artificial Sequence
  Description of Artificial Sequence: Synthetic heavy chain variable region CDR H2
GIIPAFRTAKYAKKFQD

SEQ ID NO: 726 - DNA, 51 bp, Artificial Sequence
  Description of Artificial Sequence: Synthetic heavy chain variable region CDR H2
gggatcatccccgcctttaggacagcaaaatatgcaaagaaattccaggac

SEQ ID NO: 727 - protein, 19 aa, Artificial Sequence
  Description of Artificial Sequence: Synthetic heavy chain variable region CDR H3
ARPEGDFGDLKWLRSPFDY

SEQ ID NO: 728 - DNA, 57 bp, Artificial Sequence
  Description of Artificial Sequence: Synthetic heavy chain variable region CDR H3
gcgaggcctgaaggagactttggggatttgaagtggctacgatcgccctttgactac

SEQ ID NO: 729 - DNA, 327 bp, Artificial Sequence
  Description of Artificial Sequence: Synthetic light chain variable region
gaaattgtgttgacgcagtctccagccaccctgtctgtgtctccagggcaaagagtcaccctttcctgcagggccagtcagggtgtgagcatcaacttagcctggtaccagcagaaacctggccagcctcccaggctcctcatctatggtgcatccacccgggccactgatatcccagccaggttcagtggcagtgggtctgggacagacttcactctcaccatcagcagcctgcagtctgaagattttgcagtttattattgtcagcagtatgatgactggcctccccagctcactttcggccctgggaccaagctggagatcaaa

SEQ ID NO: 730 - protein, 109 aa, Artificial Sequence
  Description of Artificial Sequence: Synthetic light chain variable region
EIVLTQSPATLSVSPGQRVTLSCRASQGVSINLAWYQQKPGQPPRLLIYGASTRATDIPARFSGSGSGTDFTLTISSLQSEDFAVYYCQQYDDWPPQLTFGPGTKLEIK

SEQ ID NO: 731 - protein, 11 aa, Artificial Sequence
  Description of Artificial Sequence: Synthetic light chain variable region CDR L1
RASQGVSINLA

SEQ ID NO: 732 - DNA, 33 bp, Artificial Sequence
  Description of Artificial Sequence: Synthetic light chain variable region CDR L1
agggccagtcagggtgtgagcatcaacttagcc

SEQ ID NO: 733 - protein, 7 aa, Artificial Sequence
  Description of Artificial Sequence: Synthetic light chain variable region CDR L2
GASTRAT

SEQ ID NO: 734 - DNA, 21 bp, Artificial Sequence
  Description of Artificial Sequence: Synthetic light chain variable region CDR L2
ggtgcatccacccgggccact

SEQ ID NO: 735 - protein, 11 aa, Artificial Sequence
  Description of Artificial Sequence: Synthetic light chain variable region CDR L3
QQYDDWPPQLT

SEQ ID NO: 736 - DNA, 33 bp, Artificial Sequence
  Description of Artificial Sequence: Synthetic light chain variable region CDR L3
cagcagtatgatgactggcctccccagctcact

SEQ ID NO: 737 - DNA, 384 bp, Artificial Sequence
  Description of Artificial Sequence: Synthetic heavy chain variable region
caggtgcagctgcaggagtcgggcccaggactagtgaagccttcggagaccctgtccctcacctgcactgtctctggtggctccatcaataactacttctggagctggatccggcagcccccagggaagggactggagtggcttggatatatctacaacagtgggagcacctactacaacccctccctcaacagtcgagtcaccatctcattacaaaagtccaagaaccagttctccctgcacctgacgtccatgaccgccgccgatacggccgtgtatttctgtgcgagacatccaagtgtgatctacgggactttcggcgccaacggggggccaaactggttcgacccctggggccagggaaccctggtcaccgtctcctca

SEQ ID NO: 738 - protein, 128 aa, Artificial Sequence
  Description of Artificial Sequence: Synthetic heavy chain variable region
QVQLQESGPGLVKPSETLSLTCTVSGGSINNYFWSWIRQPPGKGLEWLGYIYNSGSTYYNPSLNSRVTISLQKSKNQFSLHLTSMTAADTAVYFCARHPSVIYGTFGANGGPNWFDPWGQGTLVTVSS

SEQ ID NO: 739 - protein, 9 aa, Artificial Sequence
  Description of Artificial Sequence: Synthetic heavy chain variable region CDR H1
GSINNYFWS

SEQ ID NO: 740 - DNA, 27 bp, Artificial Sequence
  Description of Artificial Sequence: Synthetic heavy chain variable region CDR H1
ggctccatcaataactacttctggagc

SEQ ID NO: 741 - protein, 16 aa, Artificial Sequence
  Description of Artificial Sequence: Synthetic heavy chain variable region CDR H2
YIYNSGSTYYNPSLNS

SEQ ID NO: 742 - DNA, 48 bp, Artificial Sequence
  Description of Artificial Sequence: Synthetic heavy chain variable region CDR H2
tatatctacaacagtgggagcacctactacaacccctccctcaacagt

SEQ ID NO: 743 - protein, 22 aa, Artificial Sequence
  Description of Artificial Sequence: Synthetic heavy chain variable region CDR H3
ARHPSVIYGTFGANGGPNWFDP

SEQ ID NO: 744 - DNA, 66 bp, Artificial Sequence
  Description of Artificial Sequence: Synthetic heavy chain variable region CDR H3
gcgagacatccaagtgtgatctacgggactttcggcgccaacggggggccaaactggttcgacccc

SEQ ID NO: 745 - DNA, 330 bp, Artificial Sequence
  Description of Artificial Sequence: Synthetic light chain variable region
cagtctgttctgactcagcctgcctccgtgtctgggtctcctggacagtcgatcaccatctcctgcactggaaccagcagtgacgttggtggttataactatgtctcctggtaccaacaacacccaggcaaggcccccaaactcatgattttcgatgtcacttatcggccctcagggatttctaatcgcttctctggctccaagtctggcaacacggcctccctgaccatctctgggctccactctgaggacgaggctgattattattgcagctcatatacaggcagcaacaccgtgattttcggcggagggaccaagctgaccgtccta

SEQ ID NO: 746 - protein, 110 aa, Artificial Sequence
  Description of Artificial Sequence: Synthetic light chain variable region
QSVLTQPASVSGSPGQSITISCTGTSSDVGGYNYVSWYQQHPGKAPKLMIFDVTYRPSGISNRFSGSKSGNTASLTISGLHSEDEADYYCSSYTGSNTVIFGGGTKLTVL

SEQ ID NO: 747 - protein, 14 aa, Artificial Sequence
  Description of Artificial Sequence: Synthetic light chain variable region CDR L1
TGTSSDVGGYNYVS

SEQ ID NO: 748 - DNA, 42 bp, Artificial Sequence; identical to SEQ ID NO: 380
  Description of Artificial Sequence: Synthetic light chain variable region CDR L1

SEQ ID NO: 749 - protein, 7 aa, Artificial Sequence
  Description of Artificial Sequence: Synthetic light chain variable region CDR L2
DVTYRPS

SEQ ID NO: 750 - DNA, 21 bp, Artificial Sequence
  Description of Artificial Sequence: Synthetic light chain variable region CDR L2
gatgtcacttatcggccctca

SEQ ID NO: 751 - protein, 10 aa, Artificial Sequence
  Description of Artificial Sequence: Synthetic light chain variable region CDR L3
SSYTGSNTVI

SEQ ID NO: 752 - DNA, 30 bp, Artificial Sequence
  Description of Artificial Sequence: Synthetic light chain variable region CDR L3
agctcatatacaggcagcaacaccgtgatt

SEQ ID NO: 753 - DNA, 366 bp, Artificial Sequence
  Description of Artificial Sequence: Synthetic heavy chain variable region
caggtccagcttgtacagtctggggctgaagtgaagaagcctggggcctcagtgagggtctcctgcaaggcttctggctacaccttcagcagctactatattcactgggtgcgacaggcccctggacaagggcctgagtggctgggatggatcaacccaaagagtggtgacacaatctattcatataagtttcagggcagggtcaccttgaccagggaaacgtcaatcaccacagcctacatggagttgaccagtctgagatctgacgacacggccgtctattactgtgcgcgagttacttggcagtggctggtcctggggggttttgactactggggccagggaaccctggtcaccgtctcctca

SEQ ID NO: 754 - protein, 122 aa, Artificial Sequence
  Description of Artificial Sequence: Synthetic heavy chain variable region
QVQLVQSGAEVKKPGASVRVSCKASGYTFSSYYIHWVRQAPGQGPEWLGWINPKSGDTIYSYKFQGRVTLTRETSITTAYMELTSLRSDDTAVYYCARVTWQWLVLGGFDYWGQGTLVTVSS

SEQ ID NO: 755 - protein, 9 aa, Artificial Sequence
  Description of Artificial Sequence: Synthetic heavy chain variable region CDR H1
YTFSSYYIH

SEQ ID NO: 756 - DNA, 27 bp, Artificial Sequence
  Description of Artificial Sequence: Synthetic heavy chain variable region CDR H1
tacaccttcagcagctactatattcac

SEQ ID NO: 757 - protein, 17 aa, Artificial Sequence
  Description of Artificial Sequence: Synthetic heavy chain variable region CDR H2
WINPKSGDTIYSYKFQG

SEQ ID NO: 758 - DNA, 51 bp, Artificial Sequence
  Description of Artificial Sequence: Synthetic heavy chain variable region CDR H2
tggatcaacccaaagagtggtgacacaatctattcatataagtttcagggc

SEQ ID NO: 759 - protein, 15 aa, Artificial Sequence
  Description of Artificial Sequence: Synthetic heavy chain variable region CDR H3
ARVTWQWLVLGGFDY

SEQ ID NO: 760 - DNA, 45 bp, Artificial Sequence
  Description of Artificial Sequence: Synthetic heavy chain variable region CDR H3
gcgcgagttacttggcagtggctggtcctggggggttttgactac

SEQ ID NO: 761 - DNA, 336 bp, Artificial Sequence
  Description of Artificial Sequence: Synthetic light chain variable region
gatattgtgctgactcagtctccactctccctgcccgtcacccctggagagccggcctccatctcctgcaggtctagtctgagcctcctgcatagtaatggagacaactatttggattggtacctgcagaagccagggcagtctccacagctcctgatctatttgggttctaatcgggcctccggggtccctgacaggttcagtggcagtggatcaggcacagattttacactgaaaatcagccgagtggaggctgaggatgttggggtttattactgcatgcaagctctacacactcccctcactttcggcggagggaccaagctggagatcaaa

SEQ ID NO: 762 - protein, 112 aa, Artificial Sequence
  Description of Artificial Sequence: Synthetic light chain variable region
DIVLTQSPLSLPVTPGEPASISCRSSLSLLHSNGDNYLDWYLQKPGQSPQLLIYLGSNRASGVPDRFSGSGSGTDFTLKISRVEAEDVGVYYCMQALHTPLTFGGGTKLEIK

SEQ ID NO: 763 - protein, 16 aa, Artificial Sequence
  Description of Artificial Sequence: Synthetic light chain variable region CDR L1
RSSLSLLHSNGDNYLD

SEQ ID NO: 764 - DNA, 48 bp, Artificial Sequence
  Description of Artificial Sequence: Synthetic light chain variable region CDR L1
aggtctagtctgagcctcctgcatagtaatggagacaactatttggat

SEQ ID NO: 765 - protein, 7 aa, Artificial Sequence
  Description of Artificial Sequence: Synthetic light chain variable region CDR L2
LGSNRAS

SEQ ID NO: 766 - DNA, 21 bp, Artificial Sequence
  Description of Artificial Sequence: Synthetic light chain variable region CDR L2
ttgggttctaatcgggcctcc

SEQ ID NO: 767 - protein, 9 aa, Artificial Sequence
  Description of Artificial Sequence: Synthetic light chain variable region CDR L3
MQALHTPLT

SEQ ID NO: 768 - DNA, 27 bp, Artificial Sequence
  Description of Artificial Sequence: Synthetic light chain variable region CDR L3
atgcaagctctacacactcccctcact

SEQ ID NO: 769 - DNA, 375 bp, Artificial Sequence
  Description of Artificial Sequence: Synthetic heavy chain variable region
gaggtgcagctggtggagtctgggggaggcttggtccagcctggggggtccctgaaactctcctgtacttcctctgggctcgccttcagtggctctgctatacactgggtccgccaggcttccgggaaagggctggagtgggttggccgtattagaagcaaacctaacagttacgcgacagaatatgctgcgtcggtgaaggggaggttcaccatctccagagatgattcacagaacacggcgtatctgcaaatgaacagcctgaaagccgaggacacggccctgtattactgtactttaggatattgtagtggtgatagctgctcctctcttagggactactggggccagggaaccctggtcaccgtctcctca

SEQ ID NO: 770 - protein, 125 aa, Artificial Sequence
  Description of Artificial Sequence: Synthetic heavy chain variable region
EVQLVESGGGLVQPGGSLKLSCTSSGLAFSGSAIHWVRQASGKGLEWVGRIRSKPNSYATEYAASVKGRFTISRDDSQNTAYLQMNSLKAEDTALYYCTLGYCSGDSCSSLRDYWGQGTLVTVSS

SEQ ID NO: 771 - protein, 9 aa, Artificial Sequence
  Description of Artificial Sequence: Synthetic heavy chain variable region CDR H1
LAFSGSAIH

SEQ ID NO: 772 - DNA, 27 bp, Artificial Sequence
  Description of Artificial Sequence: Synthetic heavy chain variable region CDR H1
ctcgccttcagtggctctgctatacac

SEQ ID NO: 773 - protein, 19 aa, Artificial Sequence
  Description of Artificial Sequence: Synthetic heavy chain variable region CDR H2
RIRSKPNSYATEYAASVKG

SEQ ID NO: 774 - DNA, 57 bp, Artificial Sequence
  Description of Artificial Sequence: Synthetic heavy chain variable region CDR H2
cgtattagaagcaaacctaacagttacgcgacagaatatgctgcgtcggtgaagggg

SEQ ID NO: 775 - protein, 16 aa, Artificial Sequence
  Description of Artificial Sequence: Synthetic heavy chain variable region CDR H3
TLGYCSGDSCSSLRDY

SEQ ID NO: 776 - DNA, 48 bp, Artificial Sequence
  Description of Artificial Sequence: Synthetic heavy chain variable region CDR H3
actttaggatattgtagtggtgatagctgctcctctcttagggactac

SEQ ID NO: 777 - DNA, 330 bp, Artificial Sequence
  Description of Artificial Sequence: Synthetic light chain variable region
cagtctgctctgattcagcctgcctccgtgtctgggtctcctggacagtcgatcaccatctcctgcactggaaccagcagtgacgttggtggttataactatgtctcttggtaccaacagcacccaggcaaagcccccaaactcatgatttatgatgtcagtaatcggccctcaggggtttctaatcgcttctctggctccaagtctggcaacacggcctccctgaccatctctgggctccaggctgaggacgaggctgattattactgcagctcatatacaagtagcagcactctcgtgttcggcggagggaccaaggtcaccgtccta

SEQ ID NO: 778 - protein, 110 aa, Artificial Sequence
  Description of Artificial Sequence: Synthetic light chain variable region
QSALIQPASVSGSPGQSITISCTGTSSDVGGYNYVSWYQQHPGKAPKLMIYDVSNRPSGVSNRFSGSKSGNTASLTISGLQAEDEADYYCSSYTSSSTLVFGGGTKVTVL

SEQ ID NO: 779 - protein, 14 aa, Artificial Sequence
  Description of Artificial Sequence: Synthetic light chain variable region CDR L1
TGTSSDVGGYNYVS

SEQ ID NO: 780 - DNA, 42 bp, Artificial Sequence
  Description of Artificial Sequence: Synthetic light chain variable region CDR L1
actggaaccagcagtgacgttggtggttataactatgtctct

SEQ ID NO: 781 - protein, 7 aa, Artificial Sequence
  Description of Artificial Sequence: Synthetic light chain variable region CDR L2
DVSNRPS

SEQ ID NO: 782 - DNA, 21 bp, Artificial Sequence
  Description of Artificial Sequence: Synthetic light chain variable region CDR L2
gatgtcagtaatcggccctca

SEQ ID NO: 783 - protein, 10 aa, Artificial Sequence
  Description of Artificial Sequence: Synthetic light chain variable region CDR L3
SSYTSSSTLV

SEQ ID NO: 784 - DNA, 30 bp, Artificial Sequence
  Description of Artificial Sequence: Synthetic light chain variable region CDR L3
agctcatatacaagtagcagcactctcgtg

SEQ ID NO: 785 - DNA, 363 bp, Artificial Sequence
  Description of Artificial Sequence: Synthetic heavy chain variable region
caggtccagctggtgcagtctggaagtgaggtgaagaagcctggggcctcggtgaaggtctcctgcaaggcctcaggttacaggttttccaactatggtatcagctgggtgcgacaggcccctggacaaggcctagagtggatgggatggatcagcgcttacaatggaaacataaagtatggaaataacctccagggcagagtcaccgtgaccacagacacatccacgaccacggcctacatggaggtgaggagcctgacatctgacgacacggccgtgtattactgtgcgagagatgtcccagctgacggggtccacttcatggacgtctggggcaaagggaccacggtcaccgtctcctca

SEQ ID NO: 786 - protein, 121 aa, Artificial Sequence
  Description of Artificial Sequence: Synthetic heavy chain variable region
QVQLVQSGSEVKKPGASVKVSCKASGYRFSNYGISWVRQAPGQGLEWMGWISAYNGNIKYGNNLQGRVTVTTDTSTTTAYMEVRSLTSDDTAVYYCARDVPADGVHFMDVWGKGTTVTVSS

SEQ ID NO: 787 - protein, 9 aa, Artificial Sequence
  Description of Artificial Sequence: Synthetic heavy chain variable region CDR H1
YRFSNYGIS

SEQ ID NO: 788 - DNA, 27 bp, Artificial Sequence
  Description of Artificial Sequence: Synthetic heavy chain variable region CDR H1
tacaggttttccaactatggtatcagc

SEQ ID NO: 789 - protein, 17 aa, Artificial Sequence
  Description of Artificial Sequence: Synthetic heavy chain variable region CDR H2
WISAYNGNIKYGNNLQG

SEQ ID NO: 790 - DNA, 51 bp, Artificial Sequence; identical to SEQ ID NO: 70
  Description of Artificial Sequence: Synthetic heavy chain variable region CDR H2

SEQ ID NO: 791 - protein, 14 aa, Artificial Sequence
  Description of Artificial Sequence: Synthetic heavy chain variable region CDR H3
ARDVPADGVHFMDV

SEQ ID NO: 792 - DNA, 42 bp, Artificial Sequence; identical to SEQ ID NO: 72
  Description of Artificial Sequence: Synthetic heavy chain variable region CDR H3

SEQ ID NO: 793 - DNA, 336 bp, Artificial Sequence
  Description of Artificial Sequence: Synthetic light chain variable region
gatattgtgatgactcagactccactctccctgcccgtcacccttggacagccggcctccatctcctgcaggtctagtcaaagcctcgtacacagtgatactaacacctacttgaactggtttcagcagaggccaggccaatctccacggcgcctaatttataaggtttctaaccgggactctggggtcccagacagattcagcggcagtgggtcaggcactactttcacactgaaaatcagcagggtggaggctgaggatgttgggatttattactgcatgcagggttcacactgggctccgactttcggccaggggaccaaggtggaaatcaaa

SEQ ID NO: 794 - protein, 112 aa, Artificial Sequence
  Description of Artificial Sequence: Synthetic light chain variable region
DIVMTQTPLSLPVTLGQPASISCRSSQSLVHSDTNTYLNWFQQRPGQSPRRLIYKVSNRDSGVPDRFSGSGSGTTFTLKISRVEAEDVGIYYCMQGSHWAPTFGQGTKVEIK

SEQ ID NO: 795 - protein, 16 aa, Artificial Sequence
  Description of Artificial Sequence: Synthetic light chain variable region CDR L1
RSSQSLVHSDTNTYLN

SEQ ID NO: 796 - DNA, 48 bp, Artificial Sequence; identical to SEQ ID NO: 76
  Description of Artificial Sequence: Synthetic light chain variable region CDR L1

SEQ ID NO: 797 - protein, 7 aa, Artificial Sequence
  Description of Artificial Sequence: Synthetic light chain variable region CDR L2
KVSNRDS

SEQ ID NO: 798 - DNA, 21 bp, Artificial Sequence
  Description of Artificial Sequence: Synthetic light chain variable region CDR L2
aaggtttctaaccgggactct

SEQ ID NO: 799 - protein, 9 aa, Artificial Sequence
  Description of Artificial Sequence: Synthetic light chain variable region CDR L3
MQGSHWAPT

SEQ ID NO: 800 - DNA, 27 bp, Artificial Sequence
  Description of Artificial Sequence: Synthetic light chain variable region CDR L3
atgcagggttcacactgggctccgact

SEQ ID NO: 801 - DNA, 366 bp, Artificial Sequence
  Description of Artificial Sequence: Synthetic heavy chain variable region
caggtccagctggtgcagtctgggggaggcgtggtccagcctgggaggtccctgagactctcctgtgcagcgtctggattcaccttcagtaactatggcatgcactgggtccgccaggctccaggcaaggggctggagtgggtggcagttatatggtatgatggaagtaataaatactatgcagactccgtgaagggccgattcaccatctccagagacaattccaagaacacggtatatctgcaaatgaacagcctgagagccgacgacacggctgtctattactgtgcgagagatgcgatatttggcagtggccccaactggttcgacccctggggtcagggaaccctggtcaccgtctcctca

SEQ ID NO: 802 - protein, 122 aa, Artificial Sequence
  Description of Artificial Sequence: Synthetic heavy chain variable region
QVQLVQSGGGVVQPGRSLRLSCAASGFTFSNYGMHWVRQAPGKGLEWVAVIWYDGSNKYYADSVKGRFTISRDNSKNTVYLQMNSLRADDTAVYYCARDAIFGSGPNWFDPWGQGTLVTVSS

SEQ ID NO: 803 - protein, 9 aa, Artificial Sequence
  Description of Artificial Sequence: Synthetic heavy chain variable region CDR H1
FTFSNYGMH

SEQ ID NO: 804 - DNA, 27 bp, Artificial Sequence
  Description of Artificial Sequence: Synthetic heavy chain variable region CDR H1
ttcaccttcagtaactatggcatgcac

SEQ ID NO: 805 - protein, 17 aa, Artificial Sequence
  Description of Artificial Sequence: Synthetic heavy chain variable region CDR H2
VIWYDGSNKYYADSVKG

SEQ ID NO: 806 - DNA, 51 bp, Artificial Sequence
  Description of Artificial Sequence: Synthetic heavy chain variable region CDR H2
gttatatggtatgatggaagtaataaatactatgcagactccgtgaagggc

SEQ ID NO: 807 - protein, 15 aa, Artificial Sequence
  Description of Artificial Sequence: Synthetic heavy chain variable region CDR H3
ARDAIFGSGPNWFDP

SEQ ID NO: 808 - DNA, 45 bp, Artificial Sequence
  Description of Artificial Sequence: Synthetic heavy chain variable region CDR H3
gcgagagatgcgatatttggcagtggccccaactggttcgacccc

SEQ ID NO: 809 - DNA, 333 bp, Artificial Sequence
  Description of Artificial Sequence: Synthetic light chain variable region
cagtctgtcctgacgcagccgccctcagtgtctggggccccagggcagagggtcaccatctcctgcactgggagcagctccaacatcggggcaggttatgatgtacactggtaccagcagcttccaggaacagcccccaaactcctcatctatggtagcagcaatcggccctcaggggtccctgaccggttctctggctccaagtctggcacctcagcctccctggccatcactgggctccaggctgaggatgaggctgattattactgccagtcctatgaaagcagcctgagaggttgggtgttcggcggagggaccaaggtcaccgtccta

SEQ ID NO: 810 - protein, 111 aa, Artificial Sequence
  Description of Artificial Sequence: Synthetic light chain variable region
QSVLTQPPSVSGAPGQRVTISCTGSSSNIGAGYDVHWYQQLPGTAPKLLIYGSSNRPSGVPDRFSGSKSGTSASLAITGLQAEDEADYYCQSYESSLRGWVFGGGTKVTVL

SEQ ID NO: 811 - protein, 14 aa, Artificial Sequence
  Description of Artificial Sequence: Synthetic light chain variable region CDR L1
TGSSSNIGAGYDVH

SEQ ID NO: 812 - DNA, 42 bp, Artificial Sequence
  Description of Artificial Sequence: Synthetic light chain variable region CDR L1
actgggagcagctccaacatcggggcaggttatgatgtacac

SEQ ID NO: 813 - protein, 7 aa, Artificial Sequence
  Description of Artificial Sequence: Synthetic light chain variable region CDR L2
GSSNRPS

SEQ ID NO: 814 - DNA, 21 bp, Artificial Sequence
  Description of Artificial Sequence: Synthetic light chain variable region CDR L2
ggtagcagcaatcggccctca

SEQ ID NO: 815 - protein, 11 aa, Artificial Sequence
  Description of Artificial Sequence: Synthetic light chain variable region CDR L3
QSYESSLRGWV

SEQ ID NO: 816 - DNA, 33 bp, Artificial Sequence
  Description of Artificial Sequence: Synthetic light chain variable region CDR L3
cagtcctatgaaagcagcctgagaggttgggtg

SEQ ID NO: 817 - DNA, 351 bp, Artificial Sequence; identical to SEQ ID NO: 369
  Description of Artificial Sequence: Synthetic heavy chain variable region

SEQ ID NO: 818 - protein, 117 aa, Artificial Sequence; identical to SEQ ID NO: 370
  Description of Artificial Sequence: Synthetic heavy chain variable region

SEQ ID NO: 819 - protein, 9 aa, Artificial Sequence
  Description of Artificial Sequence: Synthetic heavy chain variable region CDR H1
FTFSDHAMY

SEQ ID NO: 820 - DNA, 27 bp, Artificial Sequence
  Description of Artificial Sequence: Synthetic heavy chain variable region CDR H1
ttcaccttcagtgaccatgctatgtac

SEQ ID NO: 821 - protein, 17 aa, Artificial Sequence
  Description of Artificial Sequence: Synthetic heavy chain variable region CDR H2
LISFDGRNIYYADSVKG

SEQ ID NO: 822 - DNA, 51 bp, Artificial Sequence; identical to SEQ ID NO: 374
  Description of Artificial Sequence: Synthetic heavy chain variable region CDR H2

SEQ ID NO: 823 - protein, 10 aa, Artificial Sequence
  Description of Artificial Sequence: Synthetic heavy chain variable region CDR H3
ARDQWLVPDY

SEQ ID NO: 824 - DNA, 30 bp, Artificial Sequence; identical to SEQ ID NO: 376
  Description of Artificial Sequence: Synthetic heavy chain variable region CDR H3

SEQ ID NO: 825 - DNA, 327 bp, Artificial Sequence
  Description of Artificial Sequence: Synthetic light chain variable region
cagtctgttctgactcagcctgcctccgtgtctgggtctcctggacagtcgatcaccatctcctgcactggaaccagcagtgacgttggtggttataactatgtctcctggtaccaacagcacccaggcaacgcccccaaactcatgatttatgaagtcagtaagcggccctcaggggtccctgatcgcttctctggcttcaagtctggcaacacggcctccctgaccgtctctgggctccaggctgaggatgaggctgattattactgcagctcatatgcaggcagcaacagtgtcttcggaactgggaccaaggtcaccgtccta

SEQ ID NO: 826 - protein, 109 aa, Artificial Sequence
  Description of Artificial Sequence: Synthetic light chain variable region
QSVLTQPASVSGSPGQSITISCTGTSSDVGGYNYVSWYQQHPGNAPKLMIYEVSKRPSGVPDRFSGFKSGNTASLTVSGLQAEDEADYYCSSYAGSNSVFGTGTKVTVL

SEQ ID NO: 827 - protein, 14 aa, Artificial Sequence
  Description of Artificial Sequence: Synthetic light chain variable region CDR L1
TGTSSDVGGYNYVS

SEQ ID NO: 828 - DNA, 42 bp, Artificial Sequence; identical to SEQ ID NO: 380
  Description of Artificial Sequence: Synthetic light chain variable region CDR L1

SEQ ID NO: 829 - protein, 7 aa, Artificial Sequence
  Description of Artificial Sequence: Synthetic light chain variable region CDR L2
EVSKRPS

SEQ ID NO: 830 - DNA, 21 bp, Artificial Sequence
  Description of Artificial Sequence: Synthetic light chain variable region CDR L2
gaagtcagtaagcggccctca

SEQ ID NO: 831 - protein, 9 aa, Artificial Sequence
  Description of Artificial Sequence: Synthetic light chain variable region CDR L3
SSYAGSNSV

SEQ ID NO: 832 - DNA, 27 bp, Artificial Sequence
  Description of Artificial Sequence: Synthetic light chain variable region CDR L3
agctcatatgcaggcagcaacagtgtc

SEQ ID NO: 833 - DNA, 384 bp, Artificial Sequence
  Description of Artificial Sequence: Synthetic heavy chain variable region
gaggtgcagctggtggagtctgggggaggcttggtaaggccgggggggtcccttggactctcatgttcagcctctggattcattttcagtaacgcttggatgacctgggtccgccaggctccagggaagggactggagtgggtcggccatattaaaagcaaagttaatggtgggacaacagcctacggtgcacccgtgaaaggcagattcaccatctcaagagatgattcacgaaacacgctgtttctgcaaatgaacagcctgaaaaccgaggacacaggcgtgtattactgtactacaggcccaccctatcagtactttgatgattccggttattcggtcgtggactactggggccagggaaccctggtcaccgtctcctcc

SEQ ID NO: 834 - protein, 128 aa, Artificial Sequence
  Description of Artificial Sequence: Synthetic heavy chain variable region
EVQLVESGGGLVRPGGSLGLSCSASGFIFSNAWMTWVRQAPGKGLEWVGHIKSKVNGGTTAYGAPVKGRFTISRDDSRNTLFLQMNSLKTEDTGVYYCTTGPPYQYFDDSGYSVVDYWGQGTLVTVSS

SEQ ID NO: 835 - protein, 9 aa, Artificial Sequence
  Description of Artificial Sequence: Synthetic heavy chain variable region CDR H1
FIFSNAWMT

SEQ ID NO: 836 - DNA, 27 bp, Artificial Sequence
  Description of Artificial Sequence: Synthetic heavy chain variable region CDR H1
ttcattttcagtaacgcttggatgacc

SEQ ID NO: 837 - protein, 19 aa, Artificial Sequence
  Description of Artificial Sequence: Synthetic heavy chain variable region CDR H2
HIKSKVNGGTTAYGAPVKG

SEQ ID NO: 838 - DNA, 57 bp, Artificial Sequence
  Description of Artificial Sequence: Synthetic heavy chain variable region CDR H2
catattaaaagcaaagttaatggtgggacaacagcctacggtgcacccgtgaaaggc

SEQ ID NO: 839 - protein, 19 aa, Artificial Sequence
  Description of Artificial Sequence: Synthetic heavy chain variable region CDR H3
TTGPPYQYFDDSGYSVVDY

SEQ ID NO: 840 - DNA, 57 bp, Artificial Sequence
  Description of Artificial Sequence: Synthetic heavy chain variable region CDR H3
actacaggcccaccctatcagtactttgatgattccggttattcggtcgtggactac

SEQ ID NO: 841 - DNA, 330 bp, Artificial Sequence
  Description of Artificial Sequence: Synthetic light chain variable region
cagtctgtggtgacgcagccgccctcagcgtctgggacccccgggcagagggtcaccatctcttgttctggaagcgactccaacatcggaactgattatttttactggtaccagcagctcccaggatcggcccccaaactcctcatctatggtagtaatcagcggccctccggggtccctgaccgattctctggctcccagtctggctccgcagcctccctggccatcagtggcctccggtccgaggatgacgctgactattactgtgcagcatgggatgacagcctgggtggtccggtgttcggcggtgggaccaaggtcaccgtccta

SEQ ID NO: 842 - protein, 110 aa, Artificial Sequence
  Description of Artificial Sequence: Synthetic light chain variable region
QSVVTQPPSASGTPGQRVTISCSGSDSNIGTDYFYWYQQLPGSAPKLLIYGSNQRPSGVPDRFSGSQSGSAASLAISGLRSEDDADYYCAAWDDSLGGPVFGGGTKVTVL

SEQ ID NO: 843 - protein, 13 aa, Artificial Sequence
  Description of Artificial Sequence: Synthetic light chain variable region CDR L1
SGSDSNIGTDYFY

SEQ ID NO: 844 - DNA, 39 bp, Artificial Sequence
  Description of Artificial Sequence: Synthetic light chain variable region CDR L1
tctggaagcgactccaacatcggaactgattatttttac

SEQ ID NO: 845 - protein, 7 aa, Artificial Sequence
  Description of Artificial Sequence: Synthetic light chain variable region CDR L2
GSNQRPS

SEQ ID NO: 846 - DNA, 21 bp, Artificial Sequence
  Description of Artificial Sequence: Synthetic light chain variable region CDR L2
ggtagtaatcagcggccctcc

SEQ ID NO: 847 - protein, 11 aa, Artificial Sequence
  Description of Artificial Sequence: Synthetic light chain variable region CDR L3
AAWDDSLGGPV

SEQ ID NO: 848 - DNA, 33 bp, Artificial Sequence
  Description of Artificial Sequence: Synthetic light chain variable region CDR L3
gcagcatgggatgacagcctgggtggtccggtg

SEQ ID NO: 849 - DNA, 366 bp, Artificial Sequence
  Description of Artificial Sequence: Synthetic heavy chain variable region
caggtgcagctacagcagtggggcacaggactggtgaagccttcggagaccctgtccctaacctgcgcagtctctggtggggccttcagcggtcaccagtggaactggttccgccagccccccgggaagggtctggagtggattggagaaatcaatgtcagtggcaacacccactacaacgtgtccctcaggagtcgggtcaccatttctctggacgagtccaagaaacaattctccctgaaaatgacctctgtcaccgccgcggatacggctatttactactgtgcgaaagcctcgagtgggtcttatcacttcgagtattggttcgacccctggagccagggaacaatggtcaccgtctcctca

SEQ ID NO: 850 - protein, 122 aa, Artificial Sequence
  Description of Artificial Sequence: Synthetic heavy chain variable region
QVQLQQWGTGLVKPSETLSLTCAVSGGAFSGHQWNWFRQPPGKGLEWIGEINVSGNTHYNVSLRSRVTISLDESKKQFSLKMTSVTAADTAIYYCAKASSGSYHFEYWFDPWSQGTMVTVSS

SEQ ID NO: 851 - protein, 9 aa, Artificial Sequence
  Description of Artificial Sequence: Synthetic heavy chain variable region CDR H1
GAFSGHQWN

SEQ ID NO: 852 - DNA, 27 bp, Artificial Sequence
  Description of Artificial Sequence: Synthetic heavy chain variable region CDR H1
ggggccttcagcggtcaccagtggaac

SEQ ID NO: 853 - protein, 16 aa, Artificial Sequence
  Description of Artificial Sequence: Synthetic heavy chain variable region CDR H2
EINVSGNTHYNVSLRS

SEQ ID NO: 854 - DNA, 48 bp, Artificial Sequence
  Description of Artificial Sequence: Synthetic heavy chain variable region CDR H2
gaaatcaatgtcagtggcaacacccactacaacgtgtccctcaggagt

SEQ ID NO: 855 - protein, 16 aa, Artificial Sequence
  Description of Artificial Sequence: Synthetic heavy chain variable region CDR H3
AKASSGSYHFEYWFDP

SEQ ID NO: 856 - DNA, 48 bp, Artificial Sequence
  Description of Artificial Sequence: Synthetic heavy chain variable region CDR H3
gcgaaagcctcgagtgggtcttatcacttcgagtattggttcgacccc

SEQ ID NO: 857 - DNA, 324 bp, Artificial Sequence
  Description of Artificial Sequence: Synthetic light chain variable region
tcctatgagctgacacagccaccctcggtgtcagtggccccaggaaagatggcctggtttacctgtgggggaagcgacattggaagtaaaagagtccactggtaccagcagaagccgggccaggcccctgtcctgctcgtgtatgatgattccttacgtccctcagggacctctgcccgagtctctggctccacctctggcaacacggccaccctgagtatcatcagcgtcgaagccggggatgaggccgactatttttgtcaggtgtgggatgatgccgacgatcatgcggtgttcggcggagggaccaagctcaccgtccta

SEQ ID NO: 858 - protein, 108 aa, Artificial Sequence
  Description of Artificial Sequence: Synthetic light chain variable region
SYELTQPPSVSVAPGKMAWFTCGGSDIGSKRVHWYQQKPGQAPVLLVYDDSLRPSGTSARVSGSTSGNTATLSIISVEAGDEADYFCQVWDDADDHAVFGGGTKLTVL

SEQ ID NO: 859 - protein, 11 aa, Artificial Sequence
  Description of Artificial Sequence: Synthetic light chain variable region CDR L1
GGSDIGSKRVH

SEQ ID NO: 860 - DNA, 33 bp, Artificial Sequence
  Description of Artificial Sequence: Synthetic light chain variable region CDR L1
gggggaagcgacattggaagtaaaagagtccac

SEQ ID NO: 861 - protein, 7 aa, Artificial Sequence
  Description of Artificial Sequence: Synthetic light chain variable region CDR L2
DDSLRPS

SEQ ID NO: 862 - DNA, 21 bp, Artificial Sequence
  Description of Artificial Sequence: Synthetic light chain variable region CDR L2
gatgattccttacgtccctca

SEQ ID NO: 863 - protein, 11 aa, Artificial Sequence
  Description of Artificial Sequence: Synthetic light chain variable region CDR L3
QVWDDADDHAV

SEQ ID NO: 864 - DNA, 33 bp, Artificial Sequence
  Description of Artificial Sequence: Synthetic light chain variable region CDR L3
caggtgtgggatgatgccgacgatcatgcggtg

SEQ ID NO: 865 - DNA, 351 bp, Artificial Sequence; identical to SEQ ID NO: 369
  Description of Artificial Sequence: Synthetic heavy chain variable region

SEQ ID NO: 866 - protein, 117 aa, Artificial Sequence; identical to SEQ ID NO: 370
  Description of Artificial Sequence: Synthetic heavy chain variable region

SEQ ID NO: 867 - protein, 9 aa, Artificial Sequence
  Description of Artificial Sequence: Synthetic heavy chain variable region CDR H1
FTFSDHAMY

SEQ ID NO: 868 - DNA, 27 bp, Artificial Sequence
  Description of Artificial Sequence: Synthetic heavy chain variable region CDR H1
ttcaccttcagtgaccatgctatgtac

SEQ ID NO: 869 - protein, 17 aa, Artificial Sequence
  Description of Artificial Sequence: Synthetic heavy chain variable region CDR H2
LISFDGRNIYYADSVKG

SEQ ID NO: 870 - DNA, 51 bp, Artificial Sequence; identical to SEQ ID NO: 374
  Description of Artificial Sequence: Synthetic heavy chain variable region CDR H2

SEQ ID NO: 871 - protein, 10 aa, Artificial Sequence
  Description of Artificial Sequence: Synthetic heavy chain variable region CDR H3
ARDQWLVPDY

SEQ ID NO: 872 - DNA, 30 bp, Artificial Sequence; identical to SEQ ID NO: 376
  Description of Artificial Sequence: Synthetic heavy chain variable region CDR H3

SEQ ID NO: 873 - DNA, 327 bp, Artificial Sequence
  Description of Artificial Sequence: Synthetic light chain variable region
cagtctgctctgactcagcctgcctccgtgtctgggtctcctggacagtcgatcaccatctcctgcactggaaccagcagtgacgttggtggttataactatgtctcctggtaccaacagcacccaggcaacgcccccaaactcatgatttatgaagtcagtaagcggccctcaggggtccctgatcgcttctctggcttcaagtctggcaacacggcctccctgaccgtctctgggctccaggctgaggatgaggctgattattactgcagctcatatgcaggcagcaacagtgtcttcggaactgggaccaaggtgaccgtccta

SEQ ID NO: 874 - protein, 109 aa, Artificial Sequence
  Description of Artificial Sequence: Synthetic light chain variable region
QSALTQPASVSGSPGQSITISCTGTSSDVGGYNYVSWYQQHPGNAPKLMIYEVSKRPSGVPDRFSGFKSGNTASLTVSGLQAEDEADYYCSSYAGSNSVFGTGTKVTVL

SEQ ID NO: 875 - protein, 14 aa, Artificial Sequence
  Description of Artificial Sequence: Synthetic light chain variable region CDR L1
TGTSSDVGGYNYVS

SEQ ID NO: 876 - DNA, 42 bp, Artificial Sequence; identical to SEQ ID NO: 380
  Description of Artificial Sequence: Synthetic light chain variable region CDR L1

SEQ ID NO: 877 - protein, 7 aa, Artificial Sequence
  Description of Artificial Sequence: Synthetic light chain variable region CDR L2
EVSKRPS

SEQ ID NO: 878 - DNA, 21 bp, Artificial Sequence
  Description of Artificial Sequence: Synthetic light chain variable region CDR L2
gaagtcagtaagcggccctca

SEQ ID NO: 879 - protein, 9 aa, Artificial Sequence
  Description of Artificial Sequence: Synthetic light chain variable region CDR L3
SSYAGSNSV

SEQ ID NO: 880 - DNA, 27 bp, Artificial Sequence
  Description of Artificial Sequence: Synthetic light chain variable region CDR L3
agctcatatgcaggcagcaacagtgtc

SEQ ID NO: 881 - DNA, 378 bp, Artificial Sequence
  Description of Artificial Sequence: Synthetic heavy chain variable region
cagatcaccttgaaggagtctggtcctacgctggtgaaacccacacagaccctcacgctgacctgctccttctctgggttctcactcaccactcgtggagtgggtgtgggctgggtccgtcagcccccaggaaaggccctggagtgccttggattcgtttattgggacgatgataagcgctacagcccatctctgaggagcagactcaccatctccgaggacacgtccaaaaaccaggtggtccttacaatgaccaacatggaccctttggacacagccacgtattactgtgtacacagcgatctctatgatagaggtggttattacttattctactttgactactggggccagggaaccctggtcaccgtctcctca

SEQ ID NO: 882 - protein, 126 aa, Artificial Sequence
  Description of Artificial Sequence: Synthetic heavy chain variable region
QITLKESGPTLVKPTQTLTLTCSFSGFSLTTRGVGVGWVRQPPGKALECLGFVYWDDDKRYSPSLRSRLTISEDTSKNQVVLTMTNMDPLDTATYYCVHSDLYDRGGYYLFYFDYWGQGTLVTVSS

SEQ ID NO: 883 - protein, 11 aa, Artificial Sequence
  Description of Artificial Sequence: Synthetic heavy chain variable region CDR H1
FSLTTRGVGVG

SEQ ID NO: 884 - DNA, 33 bp, Artificial Sequence; identical to SEQ ID NO: 596
  Description of Artificial Sequence: Synthetic heavy chain variable region CDR H1

SEQ ID NO: 885 - protein, 16 aa, Artificial Sequence
  Description of Artificial Sequence: Synthetic heavy chain variable region CDR H2
FVYWDDDKRYSPSLRS

SEQ ID NO: 886 - DNA, 48 bp, Artificial Sequence
  Description of Artificial Sequence: Synthetic heavy chain variable region CDR H2
ttcgtttattgggacgatgataagcgctacagcccatctctgaggagc

SEQ ID NO: 887 - protein, 18 aa, Artificial Sequence
  Description of Artificial Sequence: Synthetic heavy chain variable region CDR H3
VHSDLYDRGGYYLFYFDY

SEQ ID NO: 888 - DNA, 54 bp, Artificial Sequence
  Description of Artificial Sequence: Synthetic heavy chain variable region CDR H3
gtacacagcgatctctatgatagaggtggttattacttattctactttgactac

SEQ ID NO: 889 - DNA, 321 bp, Artificial Sequence
  Description of Artificial Sequence: Synthetic light chain variable region
gatattgtgctgactcagtctccatcctccctgtctgcatctgtgggggacagagtcaccatcacttgccgggcaagtcagcccattgccagctatttaaattggtatcagcacaaaccagggaaagcccctaaactcctgatctatgctgcatccagtttgcagagtggggtctcatcaacattcagtggccggggatctgggacagatttcactctcaccatcaccgctctgcaacctgaagattttgcaatttactactgtcaacagagttacactttcccgtacacttttggccaggggaccaaagtggatatcaaa

SEQ ID NO: 890 - protein, 107 aa, Artificial Sequence
  Description of Artificial Sequence: Synthetic light chain variable region
DIVLTQSPSSLSASVGDRVTITCRASQPIASYLNWYQHKPGKAPKLLIYAASSLQSGVSSTFSGRGSGTDFTLTITALQPEDFAIYYCQQSYTFPYTFGQGTKVDIK

SEQ ID NO: 891 - protein, 11 aa, Artificial Sequence
  Description of Artificial Sequence: Synthetic light chain variable region CDR L1
RASQPIASYLN

SEQ ID NO: 892 - DNA, 33 bp, Artificial Sequence
  Description of Artificial Sequence: Synthetic light chain variable region CDR L1
cgggcaagtcagcccattgccagctatttaaat

SEQ ID NO: 893 - protein, 7 aa, Artificial Sequence
  Description of Artificial Sequence: Synthetic light chain variable region CDR L2
AASSLQS

SEQ ID NO: 894 - DNA, 21 bp, Artificial Sequence
  Description of Artificial Sequence: Synthetic light chain variable region CDR L2
gctgcatccagtttgcagagt

SEQ ID NO: 895 - protein, 9 aa, Artificial Sequence
  Description of Artificial Sequence: Synthetic light chain variable region CDR L3
QQSYTFPYT

SEQ ID NO: 896 - DNA, 27 bp, Artificial Sequence
  Description of Artificial Sequence: Synthetic light chain variable region CDR L3
caacagagttacactttcccgtacact

SEQ ID NO: 897 - DNA, 354 bp, Artificial Sequence
  Description of Artificial Sequence: Synthetic heavy chain variable region
caggtgcagctggtgcagtctggagcagaggtgaagaagccgggggagtctctgaagatctcctgtcaaggttctggatatagttttagaagttactggatcggttgggtgcgccagaagcccgggaaaggcctggaatatatgggcatcatctttcctaatgactttgataccagatacagcccgtccttccaaggccaggtcaccatctccgtcgacaagtccaccagcaccgccttcctgcagtggaccagcctgcaggcctcggacaccgccatatattattgtggcagacaagagctgcagggtagttttactatatggggccaagggacaatggtcaccgtcacttca

SEQ ID NO: 898 - protein, 118 aa, Artificial Sequence
  Description of Artificial Sequence: Synthetic heavy chain variable region
QVQLVQSGAEVKKPGESLKISCQGSGYSFRSYWIGWVRQKPGKGLEYMGIIFPNDFDTRYSPSFQGQVTISVDKSTSTAFLQWTSLQASDTAIYYCGRQELQGSFTIWGQGTMVTVTS

SEQ ID NO: 899 - protein, 9 aa, Artificial Sequence
  Description of Artificial Sequence: Synthetic heavy chain variable region CDR H1
YSFRSYWIG

SEQ ID NO: 900 - DNA, 27 bp, Artificial Sequence
  Description of Artificial Sequence: Synthetic heavy chain variable region CDR H1
tatagttttagaagttactggatcggt

SEQ ID NO: 901 - protein, 17 aa, Artificial Sequence
  Description of Artificial Sequence: Synthetic heavy chain variable region CDR H2
IIFPNDFDTRYSPSFQG

SEQ ID NO: 902 - DNA, 51 bp, Artificial Sequence
  Description of Artificial Sequence: Synthetic heavy chain variable region CDR H2
atcatctttcctaatgactttgataccagatacagcccgtccttccaaggc

SEQ ID NO: 903 - protein, 11 aa, Artificial Sequence
  Description of Artificial Sequence: Synthetic heavy chain variable region CDR H3
GRQELQGSFTI

SEQ ID NO: 904 - DNA, 33 bp, Artificial Sequence
  Description of Artificial Sequence: Synthetic heavy chain variable region CDR H3
ggcagacaagagctgcagggtagttttactata

SEQ ID NO: 905 - DNA, 324 bp, Artificial Sequence
  Description of Artificial Sequence: Synthetic light chain variable region
gatattgtgatgactcagtctccatcctccctgtccgcatctgtcggagacagagtcaccatcacttgccaggcgagtcaggacatgggcaattctttaaattggtatcagcaaaagtcagggaaagcccctaaactcctgatctacgatgcatcgtatttggattcaggggtcccatcaaggttcagtggcagtggatctgggacacattttactttcaccatcagcaccctgcagcctgaagatattgcaacatattactgtcaacattatgataatctcctcttattcactttcggccctgggaccaagctggagatcaaa

SEQ ID NO: 906 - protein, 108 aa, Artificial Sequence
  Description of Artificial Sequence: Synthetic light chain variable region
DIVMTQSPSSLSASVGDRVTITCQASQDMGNSLNWYQQKSGKAPKLLIYDASYLDSGVPSRFSGSGSGTHFTFTISTLQPEDIATYYCQHYDNLLLFTFGPGTKLEIK

SEQ ID NO: 907 - protein, 11 aa, Artificial Sequence
  Description of Artificial Sequence: Synthetic light chain variable region CDR L1
QASQDMGNSLN

SEQ ID NO: 908 - DNA, 33 bp, Artificial Sequence
  Description of Artificial Sequence: Synthetic light chain variable region CDR L1
caggcgagtcaggacatgggcaattctttaaat

SEQ ID NO: 909 - protein, 7 aa, Artificial Sequence
  Description of Artificial Sequence: Synthetic light chain variable region CDR L2
DASYLDS

SEQ ID NO: 910 - DNA, 21 bp, Artificial Sequence
  Description of Artificial Sequence: Synthetic light chain variable region CDR L2
gatgcatcgtatttggattca

SEQ ID NO: 911 - protein, 10 aa, Artificial Sequence
  Description of Artificial Sequence: Synthetic light chain variable region CDR L3
QHYDNLLLFT

SEQ ID NO: 912 - DNA, 30 bp, Artificial Sequence
  Description of Artificial Sequence: Synthetic light chain variable region CDR L3
caacattatgataatctcctcttattcact

SEQ ID NO: 913 - DNA, 378 bp, Artificial Sequence
  Description of Artificial Sequence: Synthetic heavy chain variable region
cagatcaccttgaaggagtctggtcctaccctggtgaaacccacacagaccctcacgctgacctgcaccttctctgggttctcactcaccactcgtggagtgggtgtgggctggatccgtcagcccccaggaaaggccctggagttcctaggattcattcattgggatgatgataagacctacagcccatctctgaggaggagactcaccatcaccaaggacacctccaacaacgaggtggtccttacaatgaccaacatggaccctgtggacacagccacatattactgtgtccacagcgatctctatgatagtggtggttattacttatactactttgactactggggccagggaaccctggtcaccgtctcctca

SEQ ID NO: 914 - protein, 126 aa, Artificial Sequence
  Description of Artificial Sequence: Synthetic heavy chain variable region
QITLKESGPTLVKPTQTLTLTCTFSGFSLTTRGVGVGWIRQPPGKALEFLGFIHWDDDKTYSPSLRRRLTITKDTSNNEVVLTMTNMDPVDTATYYCVHSDLYDSGGYYLYYFDYWGQGTLVTVSS

SEQ ID NO: 915 - protein, 11 aa, Artificial Sequence
  Description of Artificial Sequence: Synthetic heavy chain variable region CDR H1
FSLTTRGVGVG

SEQ ID NO: 916 - DNA, 33 bp, Artificial Sequence; identical to SEQ ID NO: 596
  Description of Artificial Sequence: Synthetic heavy chain variable region CDR H1

SEQ ID NO: 917 - protein, 16 aa, Artificial Sequence
  Description of Artificial Sequence: Synthetic heavy chain variable region CDR H2
FIHWDDDKTYSPSLRR

SEQ ID NO: 918 - DNA, 48 bp, Artificial Sequence
  Description of Artificial Sequence: Synthetic heavy chain variable region CDR H2
ttcattcattgggatgatgataagacctacagcccatctctgaggagg

SEQ ID NO: 919 - protein, 18 aa, Artificial Sequence
  Description of Artificial Sequence: Synthetic heavy chain variable region CDR H3
VHSDLYDSGGYYLYYFDY

SEQ ID NO: 920 - DNA, 54 bp, Artificial Sequence
  Description of Artificial Sequence: Synthetic heavy chain variable region CDR H3
gtccacagcgatctctatgatagtggtggttattacttatactactttgactac

SEQ ID NO: 921 - DNA, 321 bp, Artificial Sequence
  Description of Artificial Sequence: Synthetic light chain variable region
gaaattgtgatgacacagtctccatcctccctgtctgcatctgtgggggacagagtcaccatcacttgccgggcaagtcagcccattcccagttatgtaaattggtatcagcagagaccagggaaagcccctaagctcctgatctatgctgcatccaatttgcagagtggggtctcatcaaaatttagtggcaggggatttgggacagatttcactctcaccatcgacactctgcaacctgaagattttgcaacttactactgtcaacaggtttacacttccccgtacacttttggccaggggaccaagctggagatcaaa

SEQ ID NO: 922 - protein, 107 aa, Artificial Sequence
  Description of Artificial Sequence: Synthetic light chain variable region
EIVMTQSPSSLSASVGDRVTITCRASQPIPSYVNWYQQRPGKAPKLLIYAASNLQSGVSSKFSGRGFGTDFTLTIDTLQPEDFATYYCQQVYTSPYTFGQGTKLEIK

SEQ ID NO: 923 - protein, 11 aa, Artificial Sequence
  Description of Artificial Sequence: Synthetic light chain variable region CDR L1
RASQPIPSYVN

SEQ ID NO: 924 - DNA, 33 bp, Artificial Sequence
  Description of Artificial Sequence: Synthetic light chain variable region CDR L1
cgggcaagtcagcccattcccagttatgtaaat

SEQ ID NO: 925 - protein, 7 aa, Artificial Sequence
  Description of Artificial Sequence: Synthetic light chain variable region CDR L2
AASNLQS

SEQ ID NO: 926 - DNA, 21 bp, Artificial Sequence
  Description of Artificial Sequence: Synthetic light chain variable region CDR L2
gctgcatccaatttgcagagt

SEQ ID NO: 927 - protein, 9 aa, Artificial Sequence
  Description of Artificial Sequence: Synthetic light chain variable region CDR L3
QQVYTSPYT

SEQ ID NO: 928 - DNA, 27 bp, Artificial Sequence
  Description of Artificial Sequence: Synthetic light chain variable region CDR L3
caacaggtttacacttccccgtacact

SEQ ID NO: 929 - DNA, 378 bp, Artificial Sequence
  Description of Artificial Sequence: Synthetic heavy chain variable region
gaggtgcagctggtggagtctggtcctacgctggtgaagcccacacagaccctcacgctgacctgcaccttctctgggttctcactcaccactcgtggaatgggtgtgggctggatccgtcagcccccaggcaggtccctggaatggcttgcagtcatttattgggatggtgatgtgcgctacagtccatctctgaagggcaggctcaccatcaccaaagacacccccaaaaaccaggtggtccttacaatgaccaacatggaccctgtggacacagccacatattactgtgtacacagcgatctctatgataggaatgcttattacctgcactactttgacttctggggccaaggaaccctggtcaccgtctcctca

SEQ ID NO: 930 - protein, 126 aa, Artificial Sequence
  Description of Artificial Sequence: Synthetic heavy chain variable region
EVQLVESGPTLVKPTQTLTLTCTFSGFSLTTRGMGVGWIRQPPGRSLEWLAVIYWDGDVRYSPSLKGRLTITKDTPKNQVVLTMTNMDPVDTATYYCVHSDLYDRNAYYLHYFDFWGQGTLVTVSS

SEQ ID NO: 931 - protein, 11 aa, Artificial Sequence
  Description of Artificial Sequence: Synthetic heavy chain variable region CDR H1
FSLTTRGMGVG

SEQ ID NO: 932 - DNA, 33 bp, Artificial Sequence
  Description of Artificial Sequence: Synthetic heavy chain variable region CDR H1
ttctcactcaccactcgtggaatgggtgtgggc

SEQ ID NO: 933 - protein, 16 aa, Artificial Sequence
  Description of Artificial Sequence: Synthetic heavy chain variable region CDR H2
VIYWDGDVRYSPSLKG

SEQ ID NO: 934 - DNA, 48 bp, Artificial Sequence
  Description of Artificial Sequence: Synthetic heavy chain variable region CDR H2
gtcatttattgggatggtgatgtgcgctacagtccatctctgaagggc

SEQ ID NO: 935 - protein, 18 aa, Artificial Sequence
  Description of Artificial Sequence: Synthetic heavy chain variable region CDR H3
VHSDLYDRNAYYLHYFDF

SEQ ID NO: 936 - DNA, 54 bp, Artificial Sequence
  Description of Artificial Sequence: Synthetic heavy chain variable region CDR H3
gtacacagcgatctctatgataggaatgcttattacctgcactactttgacttc

SEQ ID NO: 937 - DNA, 321 bp, Artificial Sequence
  Description of Artificial Sequence: Synthetic light chain variable region
gacatccggttgacccagtctccatcctccctgtctgcatctgtaggagacagagtcaccatcacttgccgggcaagtcagattattgccagttatttaaattggtatcagcagaaaccagggaaagcccctaacctcctgatctttgctgcatccagtttgcaaagtggggtcccatcaaggttccgtggcagtggatctgggacagatttcactctcaccataagcagtctgcaacctgaagactttgcaacttactactgtcaacagagttacagtataccgtacacttttggccaggggaccaagctggagatcaaa

SEQ ID NO: 938 - protein, 107 aa, Artificial Sequence
  Description of Artificial Sequence: Synthetic light chain variable region
DIRLTQSPSSLSASVGDRVTITCRASQIIASYLNWYQQKPGKAPNLLIFAASSLQSGVPSRFRGSGSGTDFTLTISSLQPEDFATYYCQQSYSIPYTFGQGTKLEIK

SEQ ID NO: 939 - protein, 11 aa, Artificial Sequence
  Description of Artificial Sequence: Synthetic light chain variable region CDR L1
RASQIIASYLN

SEQ ID NO: 940 - DNA, 33 bp, Artificial Sequence
  Description of Artificial Sequence: Synthetic light chain variable region CDR L1
cgggcaagtcagattattgccagttatttaaat

SEQ ID NO: 941 - protein, 7 aa, Artificial Sequence
  Description of Artificial Sequence: Synthetic light chain variable region CDR L2
AASSLQS

SEQ ID NO: 942 - DNA, 21 bp, Artificial Sequence
  Description of Artificial Sequence: Synthetic light chain variable region CDR L2
gctgcatccagtttgcaaagt

SEQ ID NO: 943 - protein, 9 aa, Artificial Sequence
  Description of Artificial Sequence: Synthetic light chain variable region CDR L3
QQSYSIPYT

SEQ ID NO: 944 - DNA, 27 bp, Artificial Sequence
  Description of Artificial Sequence: Synthetic light chain variable region CDR L3
caacagagttacagtataccgtacact

SEQ ID NO: 945 - DNA, 378 bp, Artificial Sequence
  Description of Artificial Sequence: Synthetic heavy chain variable region
caggtccagctggtgcagtctggtcctgcactggtgaaacccacacagaccctcacgctgacctgcaccttctctggattctcactcaccactcgtggagtgggtgtgggctggatccgtcagaccccaggaaaggccctggagtgccttggattcatttattgggatgatgatatgaactacaacccatctctgaggggcagagtcaccatcaccagggacacctccaaaaaccaggtggtcctaacaatgaccaacatggcccctgtggacacaggcacatattactgtgtacacagcgatctctatgatagtagcggttattatttatattactttgactactggggccagggaaccctggtcaccgtctcctca

SEQ ID NO: 946 - protein, 126 aa, Artificial Sequence
  Description of Artificial Sequence: Synthetic heavy chain variable region
QVQLVQSGPALVKPTQTLTLTCTFSGFSLTTRGVGVGWIRQTPGKALECLGFIYWDDDMNYNPSLRGRVTITRDTSKNQVVLTMTNMAPVDTGTYYCVHSDLYDSSGYYLYYFDYWGQGTLVTVSS

SEQ ID NO: 947 - protein, 11 aa, Artificial Sequence
  Description of Artificial Sequence: Synthetic heavy chain variable region CDR H1
FSLTTRGVGVG

SEQ ID NO: 948 - DNA, 33 bp, Artificial Sequence; identical to SEQ ID NO: 596
  Description of Artificial Sequence: Synthetic heavy chain variable region CDR H1

SEQ ID NO: 949 - protein, 16 aa, Artificial Sequence
  Description of Artificial Sequence: Synthetic heavy chain variable region CDR H2
FIYWDDDMNYNPSLRG

SEQ ID NO: 950 - DNA, 48 bp, Artificial Sequence
  Description of Artificial Sequence: Synthetic heavy chain variable region CDR H2
ttcatttattgggatgatgatatgaactacaacccatctctgaggggc

SEQ ID NO: 951 - protein, 18 aa, Artificial Sequence
  Description of Artificial Sequence: Synthetic heavy chain variable region CDR H3
VHSDLYDSSGYYLYYFDY

SEQ ID NO: 952 - DNA, 54 bp, Artificial Sequence
  Description of Artificial Sequence: Synthetic heavy chain variable region CDR H3
gtacacagcgatctctatgatagtagcggttattatttatattactttgactac

SEQ ID NO: 953 - DNA, 321 bp, Artificial Sequence
  Description of Artificial Sequence: Synthetic light chain variable region
gacatccggttgacccagtctccatcctccctgtctgcatctgtgggggacagagtcaccatcacttgccgggcaagtcagcccattgccagttatttaaattggtatcagcagaaaccagggaaagcccctaaactcctgatctatgctgcatccaatttgcagagtggggtcccttcaacattcagtggcaggggatctgggacagatttctctctcaccatctccactctgcaacctgaagacattgcaacttactactgtcaacagagttacacctccccctacacttttggccaggggaccaaggtggagatcaaa

SEQ ID NO: 954 - protein, 107 aa, Artificial Sequence
  Description of Artificial Sequence: Synthetic light chain variable region
DIRLTQSPSSLSASVGDRVTITCRASQPIASYLNWYQQKPGKAPKLLIYAASNLQSGVPSTFSGRGSGTDFSLTISTLQPEDIATYYCQQSYTSPYTFGQGTKVEIK

SEQ ID NO: 955 - protein, 11 aa, Artificial Sequence
  Description of Artificial Sequence: Synthetic light chain variable region CDR L1
RASQPIASYLN

SEQ ID NO: 956 - DNA, 33 bp, Artificial Sequence; identical to SEQ ID NO: 620
  Description of Artificial Sequence: Synthetic light chain variable region CDR L1

SEQ ID NO: 957 - protein, 7 aa, Artificial Sequence
  Description of Artificial Sequence: Synthetic light chain variable region CDR L2
AASNLQS

SEQ ID NO: 958 - DNA, 21 bp, Artificial Sequence
  Description of Artificial Sequence: Synthetic light chain variable region CDR L2
gctgcatccaatttgcagagt

SEQ ID NO: 959 - protein, 9 aa, Artificial Sequence
  Description of Artificial Sequence: Synthetic light chain variable region CDR L3
QQSYTSPYT

SEQ ID NO: 960 - DNA, 27 bp, Artificial Sequence
  Description of Artificial Sequence: Synthetic light chain variable region CDR L3
caacagagttacacctccccctacact

SEQ ID NO: 961 - DNA, 384 bp, Artificial Sequence
  Description of Artificial Sequence: Synthetic heavy chain variable region
gaggtgcagctgttggagtctgggggaggcctggttaagccgggggggtcccttagactctcatgtgcagcctctggattcattttcaataacgcctggatgacctgggtccgccaggctccagggagggggctggagtgggttggccgtataaaaaccaatgctgatggtgggactgcagactacagtacacccgtgaaaggcagattcgccatctcaagagatgattctacaaacacgctgtatctgcaaatgaacagcctgaaaaccgaggacacagccgtctattactgtaccacaggcccaccctataagtactctgacagtactggttattcggtcgttgactactggggccagggcaccctggtcactgtctcttca

SEQ ID NO: 962 - protein, 128 aa, Artificial Sequence
  Description of Artificial Sequence: Synthetic heavy chain variable region
EVQLLESGGGLVKPGGSLRLSCAASGFIFNNAWMTWVRQAPGRGLEWVGRIKTNADGGTADYSTPVKGRFAISRDDSTNTLYLQMNSLKTEDTAVYYCTTGPPYKYSDSTGYSVVDYWGQGTLVTVSS

SEQ ID NO: 963 - protein, 9 aa, Artificial Sequence
  Description of Artificial Sequence: Synthetic heavy chain variable region CDR H1
FIFNNAWMT

SEQ ID NO: 964 - DNA, 27 bp, Artificial Sequence
  Description of Artificial Sequence: Synthetic heavy chain variable region CDR H1
ttcattttcaataacgcctggatgacc

SEQ ID NO: 965 - protein, 19 aa, Artificial Sequence
  Description of Artificial Sequence: Synthetic heavy chain variable region CDR H2
RIKTNADGGTADYSTPVKG

SEQ ID NO: 966 - DNA, 57 bp, Artificial Sequence
  Description of Artificial Sequence: Synthetic heavy chain variable region CDR H2
cgtataaaaaccaatgctgatggtgggactgcagactacagtacacccgtgaaaggc

SEQ ID NO: 967 - protein, 19 aa, Artificial Sequence
  Description of Artificial Sequence: Synthetic heavy chain variable region CDR H3
TTGPPYKYSDSTGYSVVDY

SEQ ID NO: 968 - DNA, 57 bp, Artificial Sequence
  Description of Artificial Sequence: Synthetic heavy chain variable region CDR H3
accacaggcccaccctataagtactctgacagtactggttattcggtcgttgactac

SEQ ID NO: 969 - DNA, 330 bp, Artificial Sequence
  Description of Artificial Sequence: Synthetic light chain variable region
tcctatgagctgacgcagccaccctcagcgtctgggacccccgggcagagggtcaccatctcttgttctggaagcagctccaacatcggaagtaattatgtatattggtaccagcagctcccaggaacggcccccaaactcctcatctatagtactaatcagcggccctcaggggtccctgaccgattctctggctcccagtctggcacctcagcctccctggccatcagtgggctccggtccgaggatgaggctgattattactgtgcagcgtgggatgaccgcctgagtggtccggtgttcggcgggggcacccagctgaccgtcctc

SEQ ID NO: 970 - protein, 110 aa, Artificial Sequence
  Description of Artificial Sequence: Synthetic light chain variable region
SYELTQPPSASGTPGQRVTISCSGSSSNIGSNYVYWYQQLPGTAPKLLIYSTNQRPSGVPDRFSGSQSGTSASLAISGLRSEDEADYYCAAWDDRLSGPVFGGGTQLTVL

SEQ ID NO: 971 - protein, 13 aa, Artificial Sequence
  Description of Artificial Sequence: Synthetic light chain variable region CDR L1
SGSSSNIGSNYVY

SEQ ID NO: 972 - DNA, 39 bp, Artificial Sequence
  Description of Artificial Sequence: Synthetic light chain variable region CDR L1
tctggaagcagctccaacatcggaagtaattatgtatat

SEQ ID NO: 973 - protein, 7 aa, Artificial Sequence
  Description of Artificial Sequence: Synthetic light chain variable region CDR L2
STNQRPS

SEQ ID NO: 974 - DNA, 21 bp, Artificial Sequence
  Description of Artificial Sequence: Synthetic light chain variable region CDR L2
agtactaatcagcggccctca

SEQ ID NO: 975 - protein, 11 aa, Artificial Sequence
  Description of Artificial Sequence: Synthetic light chain variable region CDR L3
AAWDDRLSGPV

SEQ ID NO: 976 - DNA, 33 bp, Artificial Sequence
  Description of Artificial Sequence: Synthetic light chain variable region CDR L3
gcagcgtgggatgaccgcctgagtggtccggtg

SEQ ID NO: 977 - DNA, 363 bp, Artificial Sequence
  Description of Artificial Sequence: Synthetic heavy chain variable region
caggtccagcttgtgcagtctggggctgaggtgaagaagccggggtcctcggtgaaaatctcctgtaaggcttctggaggcaccttcaaaagtcaagctattcactgggtgcgacaggcccctggacaagggcttgagtggatgggaaacatcatccctacctacggatcaccaaacttcgcgcagaggttcctcggcagggtcaccttcattgcggacgattccactggcgctgcctccatggacctgtataggctgacatctgaggacacggccgtctattactgtgcgacagccgggtggttcggagaattagtgcggtttgactcctggggccagggaaccctggtcaccgtctcctca

SEQ ID NO: 978 - protein, 121 aa, Artificial Sequence
  Description of Artificial Sequence: Synthetic heavy chain variable region
QVQLVQSGAEVKKPGSSVKISCKASGGTFKSQAIHWVRQAPGQGLEWMGNIIPTYGSPNFAQRFLGRVTFIADDSTGAASMDLYRLTSEDTAVYYCATAGWFGELVRFDSWGQGTLVTVSS

SEQ ID NO: 979 - protein, 9 aa, Artificial Sequence
  Description of Artificial Sequence: Synthetic heavy chain variable region CDR H1
GTFKSQAIH

SEQ ID NO: 980 - DNA, 27 bp, Artificial Sequence
  Description of Artificial Sequence: Synthetic heavy chain variable region CDR H1
ggcaccttcaaaagtcaagctattcac

SEQ ID NO: 981 - protein, 17 aa, Artificial Sequence
  Description of Artificial Sequence: Synthetic heavy chain variable region CDR H2
NIIPTYGSPNFAQRFLG

SEQ ID NO: 982 - DNA, 51 bp, Artificial Sequence
  Description of Artificial Sequence: Synthetic heavy chain variable region CDR H2
aacatcatccctacctacggatcaccaaacttcgcgcagaggttcctcggc

SEQ ID NO: 983 - protein, 14 aa, Artificial Sequence
  Description of Artificial Sequence: Synthetic heavy chain variable region CDR H3
ATAGWFGELVRFDS

SEQ ID NO: 984 - DNA, 42 bp, Artificial Sequence
  Description of Artificial Sequence: Synthetic heavy chain variable region CDR H3
gcgacagccgggtggttcggagaattagtgcggtttgactcc

SEQ ID NO: 985 - DNA, 324 bp, Artificial Sequence
  Description of Artificial Sequence: Synthetic light chain variable region
gatattgtgatgactcagtctccagccaccctgtctgtgtctccaggggaaagagccaccctctcctgcagggccactgagagtattagcagcaacttagcctggtaccagcagaaacctggccaggctcccaggctcctcatctatggtgcatccaccagggccactggtatcccagccaggttcagtggcagtgggtcagggacagagttcactctcaccatcaacagcctgcagtctgaagattttgcagtttattactgtcagcagtataataactggcctcctctcactttcggcggagggaccaaagtggatatcaaa

SEQ ID NO: 986 - protein, 108 aa, Artificial Sequence
  Description of Artificial Sequence: Synthetic light chain variable region
DIVMTQSPATLSVSPGERATLSCRATESISSNLAWYQQKPGQAPRLLIYGASTRATGIPARFSGSGSGTEFTLTINSLQSEDFAVYYCQQYNNWPPLTFGGGTKVDIK

SEQ ID NO: 987 - protein, 11 aa, Artificial Sequence
  Description of Artificial Sequence: Synthetic light chain variable region CDR L1
RATESISSNLA

SEQ ID NO: 988 - DNA, 33 bp, Artificial Sequence
  Description of Artificial Sequence: Synthetic light chain variable region CDR L1
agggccactgagagtattagcagcaacttagcc

SEQ ID NO: 989 - protein, 7 aa, Artificial Sequence
  Description of Artificial Sequence: Synthetic light chain variable region CDR L2
GASTRAT

SEQ ID NO: 990 - DNA, 21 bp, Artificial Sequence
  Description of Artificial Sequence: Synthetic light chain variable region CDR L2
ggtgcatccaccagggccact

SEQ ID NO: 991 - protein, 10 aa, Artificial Sequence
  Description of Artificial Sequence: Synthetic light chain variable region CDR L3
QQYNNWPPLT

SEQ ID NO: 992 - DNA, 30 bp, Artificial Sequence; identical to SEQ ID NO: 64
  Description of Artificial Sequence: Synthetic light chain variable region CDR L3

SEQ ID NO: 993 - DNA, 369 bp, Artificial Sequence
  Description of Artificial Sequence: Synthetic heavy chain variable region
caggtccagctggtgcagtctggggctgaggtgaagaagcctgggtcctcggtgaaggtctcctgcaaggcttcaggagacaccttcagcatgtatgctatcagctgggtgcgacaggcccctggacaaggacttgagtggatgggaggggtcctcccaatgttagggacctcaaactacgcacaacagttccggggcagagtcacgataacggcggacggatccacgagcacagcctacatggagatgagcaacctgagatttgaggacacggccgtttattactgtgcgagggtggccggtctggggaacagctatggtcgctactttgacgtctggggtcagggaaccctggtcaccgtctcctca

SEQ ID NO: 994 - protein, 123 aa, Artificial Sequence
  Description of Artificial Sequence: Synthetic heavy chain variable region
QVQLVQSGAEVKKPGSSVKVSCKASGDTFSMYAISWVRQAPGQGLEWMGGVLPMLGTSNYAQQFRGRVTITADGSTSTAYMEMSNLRFEDTAVYYCARVAGLGNSYGRYFDVWGQGTLVTVSS

SEQ ID NO: 995 - protein, 9 aa, Artificial Sequence
  Description of Artificial Sequence: Synthetic heavy chain variable region CDR H1
DTFSMYAIS

SEQ ID NO: 996 - DNA, 27 bp, Artificial Sequence
  Description of Artificial Sequence: Synthetic heavy chain variable region CDR H1
gacaccttcagcatgtatgctatcagc

SEQ ID NO: 997 - protein, 17 aa, Artificial Sequence
  Description of Artificial Sequence: Synthetic heavy chain variable region CDR H2
GVLPMLGTSNYAQQFRG

SEQ ID NO: 998 - DNA, 51 bp, Artificial Sequence
  Description of Artificial Sequence: Synthetic heavy chain variable region CDR H2
ggggtcctcccaatgttagggacctcaaactacgcacaacagttccggggc

SEQ ID NO: 999 - protein, 16 aa, Artificial Sequence
  Description of Artificial Sequence: Synthetic heavy chain variable region CDR H3
ARVAGLGNSYGRYFDV

SEQ ID NO: 1000 - DNA, 48 bp, Artificial Sequence
  Description of Artificial Sequence: Synthetic heavy chain variable region CDR H3
gcgagggtggccggtctggggaacagctatggtcgctactttgacgtc

SEQ ID NO: 1001 - DNA, 321 bp, Artificial Sequence
  Description of Artificial Sequence: Synthetic light chain variable region
gacatccggatgacccagtctccatcttctgtgtctgcatctattggggacagagtcaccatcacttgtcgggcgagtcaggatatcagcacctcgttagcctggtatcagcaaagaccagggaaagcccctaatctcctgatctatgctgcgtccactttacacagtggggtcccatcgaggttcaggggcagtgaatctggcccagacttcactctcactatcagcagcctgcagcctgaagatgtcggaacttactattgtcaacaggcaaagagtttcccgtacacttttggccaggggaccaagctggagatcaaa

SEQ ID NO: 1002 - protein, 107 aa, Artificial Sequence
  Description of Artificial Sequence: Synthetic light chain variable region
DIRMTQSPSSVSASIGDRVTITCRASQDISTSLAWYQQRPGKAPNLLIYAASTLHSGVPSRFRGSESGPDFTLTISSLQPEDVGTYYCQQAKSFPYTFGQGTKLEIK

SEQ ID NO: 1003 - protein, 11 aa, Artificial Sequence
  Description of Artificial Sequence: Synthetic light chain variable region CDR L1
RASQDISTSLA

SEQ ID NO: 1004 - DNA, 33 bp, Artificial Sequence
  Description of Artificial Sequence: Synthetic light chain variable region CDR L1
cgggcgagtcaggatatcagcacctcgttagcc

SEQ ID NO: 1005 - protein, 7 aa, Artificial Sequence
  Description of Artificial Sequence: Synthetic light chain variable region CDR L2
AASTLHS

SEQ ID NO: 1006 - DNA, 21 bp, Artificial Sequence
  Description of Artificial Sequence: Synthetic light chain variable region CDR L2
gctgcgtccactttacacagt

SEQ ID NO: 1007 - protein, 9 aa, Artificial Sequence
  Description of Artificial Sequence: Synthetic light chain variable region CDR L3
QQAKSFPYT

SEQ ID NO: 1008 - DNA, 27 bp, Artificial Sequence
  Description of Artificial Sequence: Synthetic light chain variable region CDR L3
caacaggcaaagagtttcccgtacact

SEQ ID NO: 1009 - DNA, 375 bp, Artificial Sequence
  Description of Artificial Sequence: Synthetic heavy chain variable region
caggtccagcttgtgcagtctgggggaggcctggtcaagcctggggggtccctgagactctcctgtgcagcttctggattcagcctcacaaactacagaatgaactgggtccgccaggctccagggaaggggctggagtgggtctcatcccttaaggattctagttcttacatctactacgcagactcagtgaagggccgattcaccgtctccagagacgacgcgaagaattcattctttttgcaaatgaccaatgtaagagccgaggacacggctgtttattactgtgcgagagagggatcggacacggagtattggaggctgacgccccccatggacgtctggggcaacgggaccacggtcaccgtctcctca

SEQ ID NO: 1010 - protein, 125 aa, Artificial Sequence
  Description of Artificial Sequence: Synthetic heavy chain variable region
QVQLVQSGGGLVKPGGSLRLSCAASGFSLTNYRMNWVRQAPGKGLEWVSSLKDSSSYIYYADSVKGRFTVSRDDAKNSFFLQMTNVRAEDTAVYYCAREGSDTEYWRLTPPMDVWGNGTTVTVSS

SEQ ID NO: 1011 - protein, 9 aa, Artificial Sequence
  Description of Artificial Sequence: Synthetic heavy chain variable region CDR H1
FSLTNYRMN

SEQ ID NO: 1012 - DNA, 27 bp, Artificial Sequence
  Description of Artificial Sequence: Synthetic heavy chain variable region CDR H1
ttcagcctcacaaactacagaatgaac

SEQ ID NO: 1013 - protein, 17 aa, Artificial Sequence
  Description of Artificial Sequence: Synthetic heavy chain variable region CDR H2
SLKDSSSYIYYADSVKG

SEQ ID NO: 1014 - DNA, 51 bp, Artificial Sequence
  Description of Artificial Sequence: Synthetic heavy chain variable region CDR H2
tcccttaaggattctagttcttacatctactacgcagactcagtgaagggc

SEQ ID NO: 1015 - protein, 18 aa, Artificial Sequence
  Description of Artificial Sequence: Synthetic heavy chain variable region CDR H3
AREGSDTEYWRLTPPMDV

SEQ ID NO: 1016 - DNA, 54 bp, Artificial Sequence
  Description of Artificial Sequence: Synthetic heavy chain variable region CDR H3
gcgagagagggatcggacacggagtattggaggctgacgccccccatggacgtc

SEQ ID NO: 1017 - DNA, 324 bp, Artificial Sequence
  Description of Artificial Sequence: Synthetic light chain variable region
cagtctgtgttgacgcagccgccctcggtgtcagtggccccacgacagacggccaggattacctgtggggagcacaacattggaactaaaagtgtgcactggtaccagcagaagccaggccaggcccctgtcctggtcatctatgatgacagcgaccggccctcagggatccctgcgcgattctctggctccaactctgggaacacggccaccctgaccatcagctgggtcgaagccggggatgaggccgtctattactgtcaggtgtgggactcaggtgatcatccttggctgttcggcggaggcacccagctgaccgtcctc

SEQ ID NO: 1018 - protein, 108 aa, Artificial Sequence
  Description of Artificial Sequence: Synthetic light chain variable region
QSVLTQPPSVSVAPRQTARITCGEHNIGTKSVHWYQQKPGQAPVLVIYDDSDRPSGIPARFSGSNSGNTATLTISWVEAGDEAVYYCQVWDSGDHPWLFGGGTQLTVL

SEQ ID NO: 1019 - protein, 11 aa, Artificial Sequence
  Description of Artificial Sequence: Synthetic light chain variable region CDR L1
GEHNIGTKSVH

SEQ ID NO: 1020 - DNA, 33 bp, Artificial Sequence
  Description of Artificial Sequence: Synthetic light chain variable region CDR L1
ggggagcacaacattggaactaaaagtgtgcac

SEQ ID NO: 1021 - protein, 7 aa, Artificial Sequence
  Description of Artificial Sequence: Synthetic light chain variable region CDR L2
DDSDRPS

SEQ ID NO: 1022 - DNA, 21 bp, Artificial Sequence
  Description of Artificial Sequence: Synthetic light chain variable region CDR L2
gatgacagcgaccggccctca

SEQ ID NO: 1023 - protein, 11 aa, Artificial Sequence
  Description of Artificial Sequence: Synthetic light chain variable region CDR L3
QVWDSGDHPWL

SEQ ID NO: 1024 - DNA, 33 bp, Artificial Sequence
  Description of Artificial Sequence: Synthetic light chain variable region CDR L3
caggtgtgggactcaggtgatcatccttggctg

SEQ ID NO: 1025 - DNA, 366 bp, Artificial Sequence
  Description of Artificial Sequence: Synthetic heavy chain variable region
gaggtgcagctggtggagtcagggggaggcttggtacagccgggggggtccctgagactctcctgtgcagcctctggattccccttcagtcgttataacatgaactgggtccgccaggctccagggaaggggctggagtgggtttcatacattagtagtggtagtcgaagcatttactacgcagactctgtgaagggccgattcaccatctccagagacaatgccaagaactcactgtatctgcaaatgaacagcctgagagccgaggacacggctgtatattactgtgcgagagacttaagcggatctccagcatatagcggcagctgggtctggggccagggaaccctggtcaccgtctcctca

SEQ ID NO: 1026 - protein, 122 aa, Artificial Sequence
  Description of Artificial Sequence: Synthetic heavy chain variable region
EVQLVESGGGLVQPGGSLRLSCAASGFPFSRYNMNWVRQAPGKGLEWVSYISSGSRSIYYADSVKGRFTISRDNAKNSLYLQMNSLRAEDTAVYYCARDLSGSPAYSGSWVWGQGTLVTVSS

SEQ ID NO: 1027 - protein, 9 aa, Artificial Sequence
  Description of Artificial Sequence: Synthetic heavy chain variable region CDR H1
FPFSRYNMN

SEQ ID NO: 1028 - DNA, 27 bp, Artificial Sequence
  Description of Artificial Sequence: Synthetic heavy chain variable region CDR H1
ttccccttcagtcgttataacatgaac

SEQ ID NO: 1029 - protein, 17 aa, Artificial Sequence
  Description of Artificial Sequence: Synthetic heavy chain variable region CDR H2
YISSGSRSIYYADSVKG

SEQ ID NO: 1030 - DNA, 51 bp, Artificial Sequence
  Description of Artificial Sequence: Synthetic heavy chain variable region CDR H2
tacattagtagtggtagtcgaagcatttactacgcagactctgtgaagggc

SEQ ID NO: 1031 - protein, 15 aa, Artificial Sequence
  Description of Artificial Sequence: Synthetic heavy chain variable region CDR H3
ARDLSGSPAYSGSWV

SEQ ID NO: 1032 - DNA, 45 bp, Artificial Sequence
  Description of Artificial Sequence: Synthetic heavy chain variable region CDR H3
gcgagagacttaagcggatctccagcatatagcggcagctgggtc

SEQ ID NO: 1033 - DNA, 324 bp, Artificial Sequence
  Description of Artificial Sequence: Synthetic light chain variable region
gaaacgacactcacgcagtctccagccaccctgtctgtgtctccaggggaaagagccaccctctcctgcagggccagtcagagtgttagcagcaacttagcctggtaccagcagaaacctggccaggctcccaggctcctcatctatgatgcatccaccagggccactggtatcccagacaggttcagtggcagtgggtctgggacagagttcactctcaccatcagcagcctgcagtctgaagactttgcactttattactgtcagcagtatgataggtggcctccgtggacgttcggccaagggaccaaggtggaaatcaaa

SEQ ID NO: 1034 - protein, 108 aa, Artificial Sequence
  Description of Artificial Sequence: Synthetic light chain variable region
ETTLTQSPATLSVSPGERATLSCRASQSVSSNLAWYQQKPGQAPRLLIYDASTRATGIPDRFSGSGSGTEFTLTISSLQSEDFALYYCQQYDRWPPWTFGQGTKVEIK

SEQ ID NO: 1035 - protein, 11 aa, Artificial Sequence
  Description of Artificial Sequence: Synthetic light chain variable region CDR L1
RASQSVSSNLA

SEQ ID NO: 1036 - DNA, 33 bp, Artificial Sequence
  Description of Artificial Sequence: Synthetic light chain variable region CDR L1
agggccagtcagagtgttagcagcaacttagcc

SEQ ID NO: 1037 - protein, 7 aa, Artificial Sequence
  Description of Artificial Sequence: Synthetic light chain variable region CDR L2
DASTRAT

SEQ ID NO: 1038 - DNA, 21 bp, Artificial Sequence
  Description of Artificial Sequence: Synthetic light chain variable region CDR L2
gatgcatccaccagggccact

SEQ ID NO: 1039 - protein, 10 aa, Artificial Sequence
  Description of Artificial Sequence: Synthetic light chain variable region CDR L3
QQYDRWPPWT

SEQ ID NO: 1040 - DNA, 30 bp, Artificial Sequence
  Description of Artificial Sequence: Synthetic light chain variable region CDR L3
cagcagtatgataggtggcctccgtggacg

SEQ ID NO: 1041 - DNA, 378 bp, Artificial Sequence
  Description of Artificial Sequence: Synthetic heavy chain variable region
caggtccagctggtgcagtctggggctgaggtgaagaagcctggggcctcagtgaaggtctcctgcaaggcttctggaaactccttcaacgacttttatatgcactgggtgcgacaggcccctggacaagggcttgagtggatgggatggatcgaccctaacaacggaggcgcaaactatgcacagaagtttcatggcagggtcactatgaccagggactcgtccatcaacacagcctacatggagttgagcaggctgagatccgacgacacggccgtctattactgtgcgagcgagccccccggcgttggttttggattgattccccactactactttgacaactggggccagggaaccctggtcaccgtctcctca

SEQ ID NO: 1042 - protein, 126 aa, Artificial Sequence
  Description of Artificial Sequence: Synthetic heavy chain variable region
QVQLVQSGAEVKKPGASVKVSCKASGNSFNDFYMHWVRQAPGQGLEWMGWIDPNNGGANYAQKFHGRVTMTRDSSINTAYMELSRLRSDDTAVYYCASEPPGVGFGLIPHYYFDNWGQGTLVTVSS

SEQ ID NO: 1043 - protein, 9 aa, Artificial Sequence
  Description of Artificial Sequence: Synthetic heavy chain variable region CDR H1
NSFNDFYMH

SEQ ID NO: 1044 - DNA, 27 bp, Artificial Sequence
  Description of Artificial Sequence: Synthetic heavy chain variable region CDR H1
aactccttcaacgacttttatatgcac

SEQ ID NO: 1045 - protein, 17 aa, Artificial Sequence
  Description of Artificial Sequence: Synthetic heavy chain variable region CDR H2
WIDPNNGGANYAQKFHG

SEQ ID NO: 1046 - DNA, 51 bp, Artificial Sequence
  Description of Artificial Sequence: Synthetic heavy chain variable region CDR H2
tggatcgaccctaacaacggaggcgcaaactatgcacagaagtttcatggc

SEQ ID NO: 1047 - protein, 19 aa, Artificial Sequence
  Description of Artificial Sequence: Synthetic heavy chain variable region CDR H3
ASEPPGVGFGLIPHYYFDN

SEQ ID NO: 1048 - DNA, 57 bp, Artificial Sequence
  Description of Artificial Sequence: Synthetic heavy chain variable region CDR H3
gcgagcgagccccccggcgttggttttggattgattccccactactactttgacaac

SEQ ID NO: 1049 - DNA, 339 bp, Artificial Sequence
  Description of Artificial Sequence: Synthetic light chain variable region
gaaattgtgatgacacagtctccagactccctggctgtgtctctgggcgagagggccaccatcaactgcaagtccagccagaatgttttagacacctccaacaataagaactacttagcttggtaccagcagaaaccaggacagcctcctagactgctcatttactgggcatctgcccgcggatccggggtccctgaccgattcagtggcagcgggtctgggacacatttcactctcaccatcagcagcctgcaggctgaagatgtggcagtttattactgtcagcaatattttagtattcctccgacgttcggccaagggaccaaggtggagatcaaa

SEQ ID NO: 1050 - protein, 113 aa, Artificial Sequence
  Description of Artificial Sequence: Synthetic light chain variable region
EIVMTQSPDSLAVSLGERATINCKSSQNVLDTSNNKNYLAWYQQKPGQPPRLLIYWASARGSGVPDRFSGSGSGTHFTLTISSLQAEDVAVYYCQQYFSIPPTFGQGTKVEIK

SEQ ID NO: 1051 - protein, 17 aa, Artificial Sequence
  Description of Artificial Sequence: Synthetic light chain variable region CDR L1
KSSQNVLDTSNNKNYLA

SEQ ID NO: 1052 - DNA, 51 bp, Artificial Sequence
  Description of Artificial Sequence: Synthetic light chain variable region CDR L1
aagtccagccagaatgttttagacacctccaacaataagaactacttagct

SEQ ID NO: 1053 - protein, 7 aa, Artificial Sequence
  Description of Artificial Sequence: Synthetic light chain variable region CDR L2
WASARGS

SEQ ID NO: 1054 - DNA, 21 bp, Artificial Sequence
  Description of Artificial Sequence: Synthetic light chain variable region CDR L2
tgggcatctgcccgcggatcc

SEQ ID NO: 1055 - protein, 9 aa, Artificial Sequence
  Description of Artificial Sequence: Synthetic light chain variable region CDR L3
QQYFSIPPT

SEQ ID NO: 1056 - DNA, 27 bp, Artificial Sequence
  Description of Artificial Sequence: Synthetic light chain variable region CDR L3
cagcaatattttagtattcctccgacg

SEQ ID NO: 1057 - DNA, 378 bp, Artificial Sequence
  Description of Artificial Sequence: Synthetic heavy chain variable region
caggtccagctggtgcagtctggggctgaggtgaagaagcctgggtcctcggtgaaggtctcctgcaaggttgccggaggctccttctccaattatgcaatcgcctggctgcgacaggcccctggacaagggcttgagtggatgggaggtatcatccctgcctttaacagagcaatgtatgcacggaagttccaagacagagtcacaattaccgcgtacgcatcaacgaccactgcctacctggacattaccggcctcagatctgaggacacggccctttattattgtgcgaggcctgctggagactttggggatttaaagtgggtacgatcgccttttgactactggggccagggaaccctgatcaccgtctcctca

SEQ ID NO: 1058 - protein, 126 aa, Artificial Sequence
  Description of Artificial Sequence: Synthetic heavy chain variable region
QVQLVQSGAEVKKPGSSVKVSCKVAGGSFSNYAIAWLRQAPGQGLEWMGGIIPAFNRAMYARKFQDRVTITAYASTTTAYLDITGLRSEDTALYYCARPAGDFGDLKWVRSPFDYWGQGTLITVSS

SEQ ID NO: 1059 - protein, 9 aa, Artificial Sequence
  Description of Artificial Sequence: Synthetic heavy chain variable region CDR H1
GSFSNYAIA

SEQ ID NO: 1060 - DNA, 27 bp, Artificial Sequence
  Description of Artificial Sequence: Synthetic heavy chain variable region CDR H1
ggctccttctccaattatgcaatcgcc

SEQ ID NO: 1061 - protein, 17 aa, Artificial Sequence
  Description of Artificial Sequence: Synthetic heavy chain variable region CDR H2
GIIPAFNRAMYARKFQD

SEQ ID NO: 1062 - DNA, 51 bp, Artificial Sequence
  Description of Artificial Sequence: Synthetic heavy chain variable region CDR H2
ggtatcatccctgcctttaacagagcaatgtatgcacggaagttccaagac

SEQ ID NO: 1063 - protein, 19 aa, Artificial Sequence
  Description of Artificial Sequence: Synthetic heavy chain variable region CDR H3
ARPAGDFGDLKWVRSPFDY

SEQ ID NO: 1064 - DNA, 57 bp, Artificial Sequence
  Description of Artificial Sequence: Synthetic heavy chain variable region CDR H3
gcgaggcctgctggagactttggggatttaaagtgggtacgatcgccttttgactac

SEQ ID NO: 1065 - DNA, 327 bp, Artificial Sequence
  Description of Artificial Sequence: Synthetic light chain variable region
gatattgtgatgacgcagactccaggcaccctgtctgtgtctccaggggaaagagccaccctctcctgcagggccagtcaggacgttggcatcaacttagcctggtatcagcagaagcctggccaggctcccaggctcctcatatatggtgcatccaccagggccactgatgtcccagccaagttcagtggcagtgggtctgggacagacttcactctcaccatcagcagcctgcagtctgaagattttggagtttattattgtcaggagtataatgactggcctccccagctctctttcggccctgggaccaaagtggatatcaaa

SEQ ID NO: 1066 - protein, 109 aa, Artificial Sequence
  Description of Artificial Sequence: Synthetic light chain variable region
DIVMTQTPGTLSVSPGERATLSCRASQDVGINLAWYQQKPGQAPRLLIYGASTRATDVPAKFSGSGSGTDFTLTISSLQSEDFGVYYCQEYNDWPPQLSFGPGTKVDIK

SEQ ID NO: 1067 - protein, 11 aa, Artificial Sequence
  Description of Artificial Sequence: Synthetic light chain variable region CDR L1
RASQDVGINLA

SEQ ID NO: 1068 - DNA, 33 bp, Artificial Sequence
  Description of Artificial Sequence: Synthetic light chain variable region CDR L1
agggccagtcaggacgttggcatcaacttagcc

SEQ ID NO: 1069 - protein, 7 aa, Artificial Sequence
  Description of Artificial Sequence: Synthetic light chain variable region CDR L2
GASTRAT

SEQ ID NO: 1070 - DNA, 21 bp, Artificial Sequence
  Description of Artificial Sequence: Synthetic light chain variable region CDR L2
ggtgcatccaccagggccact

SEQ ID NO: 1071 - protein, 11 aa, Artificial Sequence
  Description of Artificial Sequence: Synthetic light chain variable region CDR L3
QEYNDWPPQLS

SEQ ID NO: 1072 - DNA, 33 bp, Artificial Sequence
  Description of Artificial Sequence: Synthetic light chain variable region CDR L3
caggagtataatgactggcctccccagctctct

SEQ ID NO: 1073 - DNA, 378 bp, Artificial Sequence
  Description of Artificial Sequence: Synthetic heavy chain variable region
cagatcaccttgaaggagtctggtcctacgctggtgaaacccacacagaccctcacactgacctgcaccctctctgggttctcactcagcactcctagaatgggtgtgggctggatccgtcagcccccaggaaaggccctggagtggcttgcactcattgattgggatgatgataggcgctacagtccatctctgaagaccaggctcaccatcaccaaggacacttccaaaaatcaggtggtccttagaatgaccgacatggaccctgtggacacaggcacatattactgtgtacacagcgatgtctatactactggtggttattacttgtactactttgactactggggccagggaaccctggtcaccgtctcctca

SEQ ID NO: 1074 - protein, 126 aa, Artificial Sequence
  Description of Artificial Sequence: Synthetic heavy chain variable region
QITLKESGPTLVKPTQTLTLTCTLSGFSLSTPRMGVGWIRQPPGKALEWLALIDWDDDRRYSPSLKTRLTITKDTSKNQVVLRMTDMDPVDTGTYYCVHSDVYTTGGYYLYYFDYWGQGTLVTVSS

SEQ ID NO: 1075 - protein, 11 aa, Artificial Sequence
  Description of Artificial Sequence: Synthetic heavy chain variable region CDR H1
FSLSTPRMGVG

SEQ ID NO: 1076 - DNA, 33 bp, Artificial Sequence
  Description of Artificial Sequence: Synthetic heavy chain variable region CDR H1
ttctcactcagcactcctagaatgggtgtgggc

SEQ ID NO: 1077 - protein, 16 aa, Artificial Sequence
  Description of Artificial Sequence: Synthetic heavy chain variable region CDR H2
LIDWDDDRRYSPSLKT

SEQ ID NO: 1078 - DNA, 48 bp, Artificial Sequence
  Description of Artificial Sequence: Synthetic heavy chain variable region CDR H2
ctcattgattgggatgatgataggcgctacagtccatctctgaagacc

SEQ ID NO: 1079 - protein, 18 aa, Artificial Sequence
  Description of Artificial Sequence: Synthetic heavy chain variable region CDR H3
VHSDVYTTGGYYLYYFDY

SEQ ID NO: 1080 - DNA, 54 bp, Artificial Sequence
  Description of Artificial Sequence: Synthetic heavy chain variable region CDR H3
gtacacagcgatgtctatactactggtggttattacttgtactactttgactac

SEQ ID NO: 1081 - DNA, 321 bp, Artificial Sequence
  Description of Artificial Sequence: Synthetic light chain variable region
gacatccaggtgacccagtctccatcctccctgtctgcatctgtaggagacagagtcaccatcacttgccgggcaagtcagaccattcccagctatttaaattggtatcagcacaaaccagggaaagcccctcagctcctgatctatgctgcatccaatttgcgaagtggggtcccaccgaggttccgtggcagtggatctgggacagatttcactctcaccgtcagcagtctgcaacctgaagattttgcaacttacttctgtcaacagagttacagtagcccatacacttttggccaggggaccaagctggagatcaaa

SEQ ID NO: 1082 - protein, 107 aa, Artificial Sequence
  Description of Artificial Sequence: Synthetic light chain variable region
DIQVTQSPSSLSASVGDRVTITCRASQTIPSYLNWYQHKPGKAPQLLIYAASNLRSGVPPRFRGSGSGTDFTLTVSSLQPEDFATYFCQQSYSSPYTFGQGTKLEIK

SEQ ID NO: 1083 - protein, 11 aa, Artificial Sequence
  Description of Artificial Sequence: Synthetic light chain variable region CDR L1
RASQTIPSYLN

SEQ ID NO: 1084 - DNA, 33 bp, Artificial Sequence
  Description of Artificial Sequence: Synthetic light chain variable region CDR L1
cgggcaagtcagaccattcccagctatttaaat

SEQ ID NO: 1085 - protein, 7 aa, Artificial Sequence
  Description of Artificial Sequence: Synthetic light chain variable region CDR L2
AASNLRS

SEQ ID NO: 1086 - DNA, 21 bp, Artificial Sequence
  Description of Artificial Sequence: Synthetic light chain variable region CDR L2
gctgcatccaatttgcgaagt

SEQ ID NO: 1087 - protein, 9 aa, Artificial Sequence
  Description of Artificial Sequence: Synthetic light chain variable region CDR L3
QQSYSSPYT

SEQ ID NO: 1088 - DNA, 27 bp, Artificial Sequence
  Description of Artificial Sequence: Synthetic light chain variable region CDR L3
caacagagttacagtagcccatacact

SEQ ID NO: 1089 - DNA, 357 bp, Artificial Sequence
  Description of Artificial Sequence: Synthetic heavy chain variable region
caggtccagctggtacagtctggaactgaggtgaagaagcctggggcctcagtgaaggtctcctgcaagggctctggttacatgtttgcaaattttggtgtcagctgggtgcgacaggcccctggacgagggcttgagtggatcggatggatcagcgcttacaatggaaacacatactatggacgtgagcagggcagattcaccatgaccacagacacgaacacagcctacctggagctgacgagtctcagatatgacgacacggccctttatttctgtgcgagagattcgggagcgacggcggctggaatactctgggactattggggccagggaaccctggtcaccgtctcctca

SEQ ID NO: 1090 - protein, 119 aa, Artificial Sequence
  Description of Artificial Sequence: Synthetic heavy chain variable region
QVQLVQSGTEVKKPGASVKVSCKGSGYMFANFGVSWVRQAPGRGLEWIGWISAYNGNTYYGREQGRFTMTTDTNTAYLELTSLRYDDTALYFCARDSGATAAGILWDYWGQGTLVTVSS

SEQ ID NO: 1091 - protein, 9 aa, Artificial Sequence
  Description of Artificial Sequence: Synthetic heavy chain variable region CDR H1
YMFANFGVS

SEQ ID NO: 1092 - DNA, 27 bp, Artificial Sequence
  Description of Artificial Sequence: Synthetic heavy chain variable region CDR H1
tacatgtttgcaaattttggtgtcagc

SEQ ID NO: 1093 - protein, 16 aa, Artificial Sequence
  Description of Artificial Sequence: Synthetic heavy chain variable region CDR H2
WISAYNGNTYYGREQG

SEQ ID NO: 1094 - DNA, 48 bp, Artificial Sequence
  Description of Artificial Sequence: Synthetic heavy chain variable region CDR H2
tggatcagcgcttacaatggaaacacatactatggacgtgagcagggc

SEQ ID NO: 1095 - protein, 15 aa, Artificial Sequence
  Description of Artificial Sequence: Synthetic heavy chain variable region CDR H3
ARDSGATAAGILWDY

SEQ ID NO: 1096 - DNA, 45 bp, Artificial Sequence
  Description of Artificial Sequence: Synthetic heavy chain variable region CDR H3
gcgagagattcgggagcgacggcggctggaatactctgggactat

SEQ ID NO: 1097 - DNA, 336 bp, Artificial Sequence
  Description of Artificial Sequence: Synthetic light chain variable region
gaaattgtaatgacacagtctccactctccctgcccgtcacccttggacagccggcctccatctcctgcaggtctagtcaaagcctcgcatacactgatggaagcacttacttgaattggtttcaccagaggccaggccagtctccacggcgcctaatttataaggtttttaaccgggactctggggtccccgacagattcagcggcagtggggcaggcactgatttcacactgactatcagcagggtggaggctgaggatgttggggtttattactgcatgcaagctacacactggcctcggacgttcggccaggggaccaaagtggatatcaaa

SEQ ID NO: 1098 - protein, 112 aa, Artificial Sequence
  Description of Artificial Sequence: Synthetic light chain variable region
EIVMTQSPLSLPVTLGQPASISCRSSQSLAYTDGSTYLNWFHQRPGQSPRRLIYKVFNRDSGVPDRFSGSGAGTDFTLTISRVEAEDVGVYYCMQATHWPRTFGQGTKVDIK

SEQ ID NO: 1099 - protein, 16 aa, Artificial Sequence
  Description of Artificial Sequence: Synthetic light chain variable region CDR L1
RSSQSLAYTDGSTYLN

SEQ ID NO: 1100 - DNA, 48 bp, Artificial Sequence
  Description of Artificial Sequence: Synthetic light chain variable region CDR L1
aggtctagtcaaagcctcgcatacactgatggaagcacttacttgaat

SEQ ID NO: 1101 - protein, 7 aa, Artificial Sequence
  Description of Artificial Sequence: Synthetic light chain variable region CDR L2
KVFNRDS

SEQ ID NO: 1102 - DNA, 21 bp, Artificial Sequence
  Description of Artificial Sequence: Synthetic light chain variable region CDR L2
aaggtttttaaccgggactct

SEQ ID NO: 1103 - protein, 9 aa, Artificial Sequence
  Description of Artificial Sequence: Synthetic light chain variable region CDR L3
MQATHWPRT

SEQ ID NO: 1104 - DNA, 27 bp, Artificial Sequence
  Description of Artificial Sequence: Synthetic light chain variable region CDR L3
atgcaagctacacactggcctcggacg

SEQ ID NO: 1105 - DNA, 357 bp, Artificial Sequence
  Description of Artificial Sequence: Synthetic heavy chain variable region
caggtccagctggtacagtctggaagtgaggtgaagaagcctggggcctcggtgacgctctcctgcaaggcctcaggttacaggttttccaactatggtgtcagctgggtgcgacaggcccccggacaaggcctagagtggatgggatggatcagcggttacaatggaaacataaagtatggaaacagtctccagggcagagtcaccctgaccacagacacgaccacggcctacatggaggtgacgagcctaacatctgacgacacggccgtgtattactgtgcgagagatgtcccagctgacggggtccacttcatggacgtctggggcaaagggaccacggtcaccgtctcctca

SEQ ID NO: 1106 - protein, 119 aa, Artificial Sequence
  Description of Artificial Sequence: Synthetic heavy chain variable region
QVQLVQSGSEVKKPGASVTLSCKASGYRFSNYGVSWVRQAPGQGLEWMGWISGYNGNIKYGNSLQGRVTLTTDTTTAYMEVTSLTSDDTAVYYCARDVPADGVHFMDVWGKGTTVTVSS

SEQ ID NO: 1107 - protein, 9 aa, Artificial Sequence
  Description of Artificial Sequence: Synthetic heavy chain variable region CDR H1
YRFSNYGVS

SEQ ID NO: 1108 - DNA, 27 bp, Artificial Sequence
  Description of Artificial Sequence: Synthetic heavy chain variable region CDR H1
tacaggttttccaactatggtgtcagc

SEQ ID NO: 1109 - protein, 17 aa, Artificial Sequence
  Description of Artificial Sequence: Synthetic heavy chain variable region CDR H2
WISGYNGNIKYGNSLQG

SEQ ID NO: 1110 - DNA, 51 bp, Artificial Sequence
  Description of Artificial Sequence: Synthetic heavy chain variable region CDR H2
tggatcagcggttacaatggaaacataaagtatggaaacagtctccagggc

SEQ ID NO: 1111 - protein, 14 aa, Artificial Sequence
  Description of Artificial Sequence: Synthetic heavy chain variable region CDR H3
ARDVPADGVHFMDV

SEQ ID NO: 1112 - DNA, 42 bp, Artificial Sequence; identical to SEQ ID NO: 72
  Description of Artificial Sequence: Synthetic heavy chain variable region CDR H3

SEQ ID NO: 1113 - DNA, 336 bp, Artificial Sequence
  Description of Artificial Sequence: Synthetic light chain variable region
gaaattgtattgacgcagtctccactctccctgcccgtcacccttggacagccggcctccatctcctgcaggtctagtcaaagcctcgtccacagtgatactaacacctacttgacctggtttcagcagaggccaggccaatctccacggcgcctaatttataaggtttctcaccgggactctggggtcccagacagattcagcggcagtgggtcaggcacaactttcacgctgaaaatcgccagggtggaggctgaggatgttgggatttattactgcatggaggggtcacactgggctccgactttcggccaggggaccaaagtggatatcaaa

SEQ ID NO: 1114 - protein, 112 aa, Artificial Sequence
  Description of Artificial Sequence: Synthetic light chain variable region
EIVLTQSPLSLPVTLGQPASISCRSSQSLVHSDTNTYLTWFQQRPGQSPRRLIYKVSHRDSGVPDRFSGSGSGTTFTLKIARVEAEDVGIYYCMEGSHWAPTFGQGTKVDIK

SEQ ID NO: 1115 - protein, 16 aa, Artificial Sequence
  Description of Artificial Sequence: Synthetic light chain variable region CDR L1
RSSQSLVHSDTNTYLT

SEQ ID NO: 1116 - DNA, 48 bp, Artificial Sequence
  Description of Artificial Sequence: Synthetic light chain variable region CDR L1
aggtctagtcaaagcctcgtccacagtgatactaacacctacttgacc

SEQ ID NO: 1117 - protein, 7 aa, Artificial Sequence
  Description of Artificial Sequence: Synthetic light chain variable region CDR L2
KVSHRDS

SEQ ID NO: 1118 - DNA, 21 bp, Artificial Sequence
  Description of Artificial Sequence: Synthetic light chain variable region CDR L2
aaggtttctcaccgggactct

SEQ ID NO: 1119 - protein, 9 aa, Artificial Sequence
  Description of Artificial Sequence: Synthetic light chain variable region CDR L3
MEGSHWAPT

SEQ ID NO: 1120 - DNA, 27 bp, Artificial Sequence
  Description of Artificial Sequence: Synthetic light chain variable region CDR L3
atggaggggtcacactgggctccgact

SEQ ID NO: 1121 - DNA, 384 bp, Artificial Sequence
  Description of Artificial Sequence: Synthetic heavy chain variable region
caggtgcagctacagcagtggggggccgaggtgaagaagcctgggtcatcggtgaaggtctcctgcaaggcttctggagtcgccttgagcagcgttgcaatcagctgggtgcgacaggcccctggacaagggcttgagtggatgggagggatcctccctgggtttgacaaggtcagatttgcccaggagtttgagaatagagccactctaaccgcggacacagctagggatatagcctacatggagttgagcggactgagatctgacgacacggccgtctactactgtgcgataatcgacccccaagattgcactagtgccagctgcttttgggtcaactggctcgacccctggggccagggaaccctggtcaccgtctcctca

SEQ ID NO: 1122 - protein, 128 aa, Artificial Sequence
  Description of Artificial Sequence: Synthetic heavy chain variable region
QVQLQQWGAEVKKPGSSVKVSCKASGVALSSVAISWVRQAPGQGLEWMGGILPGFDKVRFAQEFENRATLTADTARDIAYMELSGLRSDDTAVYYCAIIDPQDCTSASCFWVNWLDPWGQGTLVTVSS

SEQ ID NO: 1123 - protein, 9 aa, Artificial Sequence
  Description of Artificial Sequence: Synthetic heavy chain variable region CDR H1
VALSSVAIS

SEQ ID NO: 1124 - DNA, 27 bp, Artificial Sequence
  Description of Artificial Sequence: Synthetic heavy chain variable region CDR H1
gtcgccttgagcagcgttgcaatcagc

SEQ ID NO: 1125 - protein, 17 aa, Artificial Sequence
  Description of Artificial Sequence: Synthetic heavy chain variable region CDR H2
GILPGFDKVRFAQEFEN

SEQ ID NO: 1126 - DNA, 51 bp, Artificial Sequence
  Description of Artificial Sequence: Synthetic heavy chain variable region CDR H2
gggatcctccctgggtttgacaaggtcagatttgcccaggagtttgagaat

SEQ ID NO: 1127 - protein, 21 aa, Artificial Sequence
  Description of Artificial Sequence: Synthetic heavy chain variable region CDR H3
AIIDPQDCTSASCFWVNWLDP

SEQ ID NO: 1128 - DNA, 63 bp, Artificial Sequence
  Description of Artificial Sequence: Synthetic heavy chain variable region CDR H3
gcgataatcgacccccaagattgcactagtgccagctgcttttgggtcaactggctcgacccc

SEQ ID NO: 1129 - DNA, 324 bp, Artificial Sequence
  Description of Artificial Sequence: Synthetic light chain variable region
gaaacgacactcacgcagtctccaggcaccctgaccgtgtctccaggggagagagccaccctctcctgcagggccagtcagagtattattagaaacaacctagcctggtaccagcagaaacctggccaggctcccaggctcctcatctatgctgcatccaatagggccactgacatcccagacaggttcagtggcagtgggtctgggacagacttcactctcaccatcagcagactggaagcacaagattttgcagtgtatttctgtcagcagtatggtacctctccgatcaccttcggccaagggaccaaggtggaaatcaaa

SEQ ID NO: 1130 - protein, 108 aa, Artificial Sequence
  Description of Artificial Sequence: Synthetic light chain variable region
ETTLTQSPGTLTVSPGERATLSCRASQSIIRNNLAWYQQKPGQAPRLLIYAASNRATDIPDRFSGSGSGTDFTLTISRLEAQDFAVYFCQQYGTSPITFGQGTKVEIK

SEQ ID NO: 1131 - protein, 12 aa, Artificial Sequence
  Description of Artificial Sequence: Synthetic light chain variable region CDR L1
RASQSIIRNNLA

SEQ ID NO: 1132 - DNA, 36 bp, Artificial Sequence
  Description of Artificial Sequence: Synthetic light chain variable region CDR L1
agggccagtcagagtattattagaaacaacctagcc

SEQ ID NO: 1133 - protein, 7 aa, Artificial Sequence
  Description of Artificial Sequence: Synthetic light chain variable region CDR L2
AASNRAT

SEQ ID NO: 1134 - DNA, 21 bp, Artificial Sequence
  Description of Artificial Sequence: Synthetic light chain variable region CDR L2
gctgcatccaatagggccact

SEQ ID NO: 1135 - protein, 9 aa, Artificial Sequence
  Description of Artificial Sequence: Synthetic light chain variable region CDR L3
QQYGTSPIT

SEQ ID NO: 1136 - DNA, 27 bp, Artificial Sequence
  Description of Artificial Sequence: Synthetic light chain variable region CDR L3
cagcagtatggtacctctccgatcacc

SEQ ID NO: 1137 - DNA, 378 bp, Artificial Sequence
  Description of Artificial Sequence: Synthetic heavy chain variable region
gaggtgcagctgttggagtctggggctgaggtgaagaagcctgggtcctcggtgaaggtctcctgcaaggttgccggaggaaccttcagcgactacgccatcagctgggtgcgacaggcccctggtcaagggctggagtacttgggagggatcattcctgcctttaaaagagcaatgtatccacggaagtttcaagacagagtcaccattaccgcggacgagtccacgagcactgcctacatggagctgagaggcctgagatctgaagacacggccctgtattattgtgcgagacctgctggagactttggcgatttaaagtggctacgatcgccttttgactactggggccagggaaccctggtcaccgtctcctca

SEQ ID NO: 1138 - protein, 126 aa, Artificial Sequence
  Description of Artificial Sequence: Synthetic heavy chain variable region
EVQLLESGAEVKKPGSSVKVSCKVAGGTFSDYAISWVRQAPGQGLEYLGGIIPAFKRAMYPRKFQDRVTITADESTSTAYMELRGLRSEDTALYYCARPAGDFGDLKWLRSPFDYWGQGTLVTVSS

SEQ ID NO: 1139 - protein, 9 aa, Artificial Sequence
  Description of Artificial Sequence: Synthetic heavy chain variable region CDR H1
GTFSDYAIS

SEQ ID NO: 1140 - DNA, 27 bp, Artificial Sequence
  Description of Artificial Sequence: Synthetic heavy chain variable region CDR H1
ggaaccttcagcgactacgccatcagc

SEQ ID NO: 1141 - protein, 17 aa, Artificial Sequence
  Description of Artificial Sequence: Synthetic heavy chain variable region CDR H2
GIIPAFKRAMYPRKFQD

SEQ ID NO: 1142 - DNA, 51 bp, Artificial Sequence
  Description of Artificial Sequence: Synthetic heavy chain variable region CDR H2
gggatcattcctgcctttaaaagagcaatgtatccacggaagtttcaagac

SEQ ID NO: 1143 - protein, 19 aa, Artificial Sequence
  Description of Artificial Sequence: Synthetic heavy chain variable region CDR H3
ARPAGDFGDLKWLRSPFDY

SEQ ID NO: 1144 - DNA, 57 bp, Artificial Sequence
  Description of Artificial Sequence: Synthetic heavy chain variable region CDR H3
gcgagacctgctggagactttggcgatttaaagtggctacgatcgccttttgactac

SEQ ID NO: 1145 - DNA, 327 bp, Artificial Sequence
  Description of Artificial Sequence: Synthetic light chain variable region
gatattgtgctgactcagtctccagccaccctgtctgtgtctccaggggaaagagccacgctctcctgcagggccagtgagggtgtaggcatcaacttagcctggtaccagcagaaacctggccaggctcccaggctcctcatctatggtgcatcgaccagggccactgatatcccagccaggttcagtggcagtgggtctgggacagacttcactctcaccatcagcagcctgcaatctgaagattttgcagtttattattgtcagcagtataatgattggcctccccagctcactttcggccctgggaccaaagtggatatcaaa

SEQ ID NO: 1146 - protein, 109 aa, Artificial Sequence
  Description of Artificial Sequence: Synthetic light chain variable region
DIVLTQSPATLSVSPGERATLSCRASEGVGINLAWYQQKPGQAPRLLIYGASTRATDIPARFSGSGSGTDFTLTISSLQSEDFAVYYCQQYNDWPPQLTFGPGTKVDIK

SEQ ID NO: 1147 - protein, 11 aa, Artificial Sequence
  Description of Artificial Sequence: Synthetic light chain variable region CDR L1
RASEGVGINLA

SEQ ID NO: 1148 - DNA, 33 bp, Artificial Sequence
  Description of Artificial Sequence: Synthetic light chain variable region CDR L1
agggccagtgagggtgtaggcatcaacttagcc

SEQ ID NO: 1149 - protein, 7 aa, Artificial Sequence
  Description of Artificial Sequence: Synthetic light chain variable region CDR L2
GASTRAT

SEQ ID NO: 1150 - DNA, 21 bp, Artificial Sequence
  Description of Artificial Sequence: Synthetic light chain variable region CDR L2
ggtgcatcgaccagggccact

SEQ ID NO: 1151 - protein, 11 aa, Artificial Sequence
  Description of Artificial Sequence: Synthetic light chain variable region CDR L3
QQYNDWPPQLT

SEQ ID NO: 1152 - DNA, 33 bp, Artificial Sequence
  Description of Artificial Sequence: Synthetic light chain variable region CDR L3
cagcagtataatgattggcctccccagctcact

SEQ ID NO: 1153 - DNA, 378 bp, Artificial Sequence
  Description of Artificial Sequence: Synthetic heavy chain variable region
gaggtgcagctggtggagtctggggctgaggtgaagaagcctgggtcctcggtgaaggtctcctgtaaggttgtcggaggcagtttcagcaactatggtatcagctgggtgcgacaggcccctggacaggggcctgagtggatgggcgggatcatccctgcctttaagacagcaaaatatgcaaagaagttcgaggacagagtcacaattaccgcggacgaatccacgagcactgcctacatggaggtgagcggcctgagatctgacgacacggccctgtattattgtgcgaggcctgaacgagactttgggcatttaaagtggctacgctcgccttttgactactggggccagggaaccctggtcaccgtctcctca

SEQ ID NO: 1154 - protein, 126 aa, Artificial Sequence
  Description of Artificial Sequence: Synthetic heavy chain variable region
EVQLVESGAEVKKPGSSVKVSCKVVGGSFSNYGISWVRQAPGQGPEWMGGIIPAFKTAKYAKKFEDRVTITADESTSTAYMEVSGLRSDDTALYYCARPERDFGHLKWLRSPFDYWGQGTLVTVSS

SEQ ID NO: 1155 - protein, 9 aa, Artificial Sequence
  Description of Artificial Sequence: Synthetic heavy chain variable region CDR H1
GSFSNYGIS

SEQ ID NO: 1156 - DNA, 27 bp, Artificial Sequence
  Description of Artificial Sequence: Synthetic heavy chain variable region CDR H1
ggcagtttcagcaactatggtatcagc

SEQ ID NO: 1157 - protein, 17 aa, Artificial Sequence
  Description of Artificial Sequence: Synthetic heavy chain variable region CDR H2
GIIPAFKTAKYAKKFED

SEQ ID NO: 1158 - DNA, 51 bp, Artificial Sequence
  Description of Artificial Sequence: Synthetic heavy chain variable region CDR H2
gggatcatccctgcctttaagacagcaaaatatgcaaagaagttcgaggac

SEQ ID NO: 1159 - protein, 19 aa, Artificial Sequence
  Description of Artificial Sequence: Synthetic heavy chain variable region CDR H3
ARPERDFGHLKWLRSPFDY

SEQ ID NO: 1160 - DNA, 57 bp, Artificial Sequence
  Description of Artificial Sequence: Synthetic heavy chain variable region CDR H3
gcgaggcctgaacgagactttgggcatttaaagtggctacgctcgccttttgactac

SEQ ID NO: 1161 - DNA, 327 bp, Artificial Sequence
  Description of Artificial Sequence: Synthetic light chain variable region
gaaacgacactcacgcagtctccagccaccctgtctgtgtctccaggggaaagagtcaccctctcctgcagggccagtcagggtgttagcatcaacttagcctggtaccagcagaaacctggccaggctcccaggctcctcatctatggtgcatccaccagggccactgatatcccagccaggttcagtggcagtgggtctgggacagacttcactctcaccatcagcagcctgcagtctgaagattttgcagtttattattgtcagcagtataatgactggcctccccagctcactttcggccctgggaccaaggtggaaatcaaa

SEQ ID NO: 1162 - protein, 109 aa, Artificial Sequence
  Description of Artificial Sequence: Synthetic light chain variable region
ETTLTQSPATLSVSPGERVTLSCRASQGVSINLAWYQQKPGQAPRLLIYGASTRATDIPARFSGSGSGTDFTLTISSLQSEDFAVYYCQQYNDWPPQLTFGPGTKVEIK

SEQ ID NO: 1163 - protein, 11 aa, Artificial Sequence
  Description of Artificial Sequence: Synthetic light chain variable region CDR L1
RASQGVSINLA

SEQ ID NO: 1164 - DNA, 33 bp, Artificial Sequence
  Description of Artificial Sequence: Synthetic light chain variable region CDR L1
agggccagtcagggtgttagcatcaacttagcc

SEQ ID NO: 1165 - protein, 7 aa, Artificial Sequence
  Description of Artificial Sequence: Synthetic light chain variable region CDR L2
GASTRAT

SEQ ID NO: 1166 - DNA, 21 bp, Artificial Sequence
  Description of Artificial Sequence: Synthetic light chain variable region CDR L2
ggtgcatccaccagggccact

SEQ ID NO: 1167 - protein, 11 aa, Artificial Sequence
  Description of Artificial Sequence: Synthetic light chain variable region CDR L3
QQYNDWPPQLT

SEQ ID NO: 1168 - DNA, 33 bp, Artificial Sequence
  Description of Artificial Sequence: Synthetic light chain variable region CDR L3
cagcagtataatgactggcctccccagctcact

SEQ ID NO: 1169 - DNA, 384 bp, Artificial Sequence
  Description of Artificial Sequence: Synthetic heavy chain variable region
caggtccagctggtgcagtctgggtctgaggtgaagaggcctgggtcatcggtgaaggtctcctgcaaggcctcaggagtcgctttgaccaccgttgctgtcaactgggtgcgccaggtccctgggcaagggcctgagtggattggagggatcctcattgggtttggtaaggtcagacaggcccagaaatttgagaaccgagtcacttttaccgcggacgcatctaggaacacagcctacatggagttgagcggactgagatctgaggacacggccgtctattactgtgcgataatcgacccccaagattgtactcgtgccagttgcttttgggtcaactggctcgccccctggggccacggaaccctggtcaccgtctcctca

SEQ ID NO: 1170 - protein, 128 aa, Artificial Sequence
  Description of Artificial Sequence: Synthetic heavy chain variable region
QVQLVQSGSEVKRPGSSVKVSCKASGVALTTVAVNWVRQVPGQGPEWIGGILIGFGKVRQAQKFENRVTFTADASRNTAYMELSGLRSEDTAVYYCAIIDPQDCTRASCFWVNWLAPWGHGTLVTVSS

SEQ ID NO: 1171 - protein, 9 aa, Artificial Sequence
  Description of Artificial Sequence: Synthetic heavy chain variable region CDR H1
VALTTVAVN

SEQ ID NO: 1172 - DNA, 27 bp, Artificial Sequence
  Description of Artificial Sequence: Synthetic heavy chain variable region CDR H1
gtcgctttgaccaccgttgctgtcaac

SEQ ID NO: 1173 - protein, 17 aa, Artificial Sequence
  Description of Artificial Sequence: Synthetic heavy chain variable region CDR H2
GILIGFGKVRQAQKFEN

SEQ ID NO: 1174 - DNA, 51 bp, Artificial Sequence
  Description of Artificial Sequence: Synthetic heavy chain variable region CDR H2
gggatcctcattgggtttggtaaggtcagacaggcccagaaatttgagaac

SEQ ID NO: 1175 - protein, 21 aa, Artificial Sequence
  Description of Artificial Sequence: Synthetic heavy chain variable region CDR H3
AIIDPQDCTRASCFWVNWLAP

SEQ ID NO: 1176 - DNA, 63 bp, Artificial Sequence
  Description of Artificial Sequence: Synthetic heavy chain variable region CDR H3
gcgataatcgacccccaagattgtactcgtgccagttgcttttgggtcaactggctcgccccc

SEQ ID NO: 1177 - DNA, 324 bp, Artificial Sequence
  Description of Artificial Sequence: Synthetic light chain variable region
gacatccgggtgacccagtctccaggcaccctgaccttgtccccaggggagagagcctccctctcctgcagggccagtgagagtattcttaacgggaacttagcctggtaccaacagaaacctggccaggctcccaggctcctcatctatgctgcttccagtagggccactgacatcccagacaggttcagtggcagtgggtctgggacagacttcactctcaccatcagcagactggagcctcaagattttgcagtctattattgtcagcagtatggttcggctccgatcaccttcggccaagggacacgactggagattaaa

SEQ ID NO: 1178 - protein, 108 aa, Artificial Sequence
  Description of Artificial Sequence: Synthetic light chain variable region
DIRVTQSPGTLTLSPGERASLSCRASESILNGNLAWYQQKPGQAPRLLIYAASSRATDIPDRFSGSGSGTDFTLTISRLEPQDFAVYYCQQYGSAPITFGQGTRLEIK

SEQ ID NO: 1179 - protein, 12 aa, Artificial Sequence
  Description of Artificial Sequence: Synthetic light chain variable region CDR L1
RASESILNGNLA

SEQ ID NO: 1180 - DNA, 36 bp, Artificial Sequence
  Description of Artificial Sequence: Synthetic light chain variable region CDR L1
agggccagtgagagtattcttaacgggaacttagcc

SEQ ID NO: 1181 - protein, 7 aa, Artificial Sequence
  Description of Artificial Sequence: Synthetic light chain variable region CDR L2
AASSRAT

SEQ ID NO: 1182 - DNA, 21 bp, Artificial Sequence
  Description of Artificial Sequence: Synthetic light chain variable region CDR L2
gctgcttccagtagggccact

SEQ ID NO: 1183 - protein, 9 aa, Artificial Sequence
  Description of Artificial Sequence: Synthetic light chain variable region CDR L3
QQYGSAPIT

SEQ ID NO: 1184 - DNA, 27 bp, Artificial Sequence
  Description of Artificial Sequence: Synthetic light chain variable region CDR L3
cagcagtatggttcggctccgatcacc

SEQ ID NO: 1185 - DNA, 357 bp, Artificial Sequence
  Description of Artificial Sequence: Synthetic heavy chain variable region
caggtccagcttgtacagtctggaagtgaggtgaagaagcctggggcctcggtgacggtctcctgcaaggcctcaggttacaggttttccaactatggtgtcagctgggtgcgacaggcccctggacaaggcctagagtggatgggatggatcagcgcttacaatggaaacacaaagtatggaaatagtctccagggcagagtcaccctgaccacagacacgaccacggcctacatggaggtgaggagcctgacatctgacgacacggccgtgtattactgtgcgagagatgtcccaggtgacggggtccacttcatggacgtctggggcaaagggaccacggtcaccgtctcctca

SEQ ID NO: 1186 - protein, 119 aa, Artificial Sequence
  Description of Artificial Sequence: Synthetic heavy chain variable region
QVQLVQSGSEVKKPGASVTVSCKASGYRFSNYGVSWVRQAPGQGLEWMGWISAYNGNTKYGNSLQGRVTLTTDTTTAYMEVRSLTSDDTAVYYCARDVPGDGVHFMDVWGKGTTVTVSS

SEQ ID NO: 1187 - protein, 9 aa, Artificial Sequence
  Description of Artificial Sequence: Synthetic heavy chain variable region CDR H1
YRFSNYGVS

SEQ ID NO: 1188 - DNA, 27 bp, Artificial Sequence
  Description of Artificial Sequence: Synthetic heavy chain variable region CDR H1
tacaggttttccaactatggtgtcagc

SEQ ID NO: 1189 - protein, 17 aa, Artificial Sequence
  Description of Artificial Sequence: Synthetic heavy chain variable region CDR H2
WISAYNGNTKYGNSLQG

SEQ ID NO: 1190 - DNA, 51 bp, Artificial Sequence
  Description of Artificial Sequence: Synthetic heavy chain variable region CDR H2
tggatcagcgcttacaatggaaacacaaagtatggaaatagtctccagggc

SEQ ID NO: 1191 - protein, 14 aa, Artificial Sequence
  Description of Artificial Sequence: Synthetic heavy chain variable region CDR H3
ARDVPGDGVHFMDV

SEQ ID NO: 1192 - DNA, 42 bp, Artificial Sequence
  Description of Artificial Sequence: Synthetic heavy chain variable region CDR H3
gcgagagatgtcccaggtgacggggtccacttcatggacgtc

SEQ ID NO: 1193 - DNA, 336 bp, Artificial Sequence
  Description of Artificial Sequence: Synthetic light chain variable region
gaaattgtgatgacgcagtctccactctccctgcccgtcacccttggacagtcggcctccatctcctgcaggtcgagtcaaagcctcgtacacagtgatactaacacctacttgacctggtttcagcagaggccaggccaatctccacggcgcctcatttataaggtttctcaccgggactctggggtcccagacagattcagcggcagtgggtcaggcactacttttacactgaaaatcagcagggtggaggctgaggatgttggaatttattactgcatggagggttcacactgggctccgactttcggccaggggaccaaggtggaaatcaaa

SEQ ID NO: 1194 - protein, 112 aa, Artificial Sequence
  Description of Artificial Sequence: Synthetic light chain variable region
EIVMTQSPLSLPVTLGQSASISCRSSQSLVHSDTNTYLTWFQQRPGQSPRRLIYKVSHRDSGVPDRFSGSGSGTTFTLKISRVEAEDVGIYYCMEGSHWAPTFGQGTKVEIK

SEQ ID NO: 1195 - protein, 16 aa, Artificial Sequence
  Description of Artificial Sequence: Synthetic light chain variable region CDR L1
RSSQSLVHSDTNTYLT

SEQ ID NO: 1196 - DNA, 48 bp, Artificial Sequence
  Description of Artificial Sequence: Synthetic light chain variable region CDR L1
aggtcgagtcaaagcctcgtacacagtgatactaacacctacttgacc

SEQ ID NO: 1197 - protein, 7 aa, Artificial Sequence
  Description of Artificial Sequence: Synthetic light chain variable region CDR L2
KVSHRDS

SEQ ID NO: 1198 - DNA, 21 bp, Artificial Sequence
  Description of Artificial Sequence: Synthetic light chain variable region CDR L2
aaggtttctcaccgggactct

SEQ ID NO: 1199 - protein, 9 aa, Artificial Sequence
  Description of Artificial Sequence: Synthetic light chain variable region CDR L3
MEGSHWAPT

SEQ ID NO: 1200 - DNA, 27 bp, Artificial Sequence
  Description of Artificial Sequence: Synthetic light chain variable region CDR L3
atggagggttcacactgggctccgact

SEQ ID NO: 1201 - DNA, 354 bp, Artificial Sequence
  Description of Artificial Sequence: Synthetic heavy chain variable region
caggtccagcttgtgcagtctgggggaggcgttgtccagcctgggagctccctgagactctcctgttcagcgtctggatttaccttcatgacctatggcatgcactgggcccgccaggctccaggcaaggggctggagtgggtcgcagatatttcctttgatgcaaataagaaatactatagagattccgtgaagggccgattcaccatctccagggacaattccaagaacacggtgtatctgcaaatgaacagcctgagacccgaggacacggctgtctacttctgtgcgagaaatacgatttttggagtagttgactactggggccagggaaccctggtcaccgtctcctca

SEQ ID NO: 1202 - protein, 118 aa, Artificial Sequence
  Description of Artificial Sequence: Synthetic heavy chain variable region
QVQLVQSGGGVVQPGSSLRLSCSASGFTFMTYGMHWARQAPGKGLEWVADISFDANKKYYRDSVKGRFTISRDNSKNTVYLQMNSLRPEDTAVYFCARNTIFGVVDYWGQGTLVTVSS

SEQ ID NO: 1203 - protein, 9 aa, Artificial Sequence
  Description of Artificial Sequence: Synthetic heavy chain variable region CDR H1
FTFMTYGMH

SEQ ID NO: 1204 - DNA, 27 bp, Artificial Sequence
  Description of Artificial Sequence: Synthetic heavy chain variable region CDR H1
tttaccttcatgacctatggcatgcac

SEQ ID NO: 1205 - protein, 17 aa, Artificial Sequence
  Description of Artificial Sequence: Synthetic heavy chain variable region CDR H2
DISFDANKKYYRDSVKG

SEQ ID NO: 1206 - DNA, 51 bp, Artificial Sequence
  Description of Artificial Sequence: Synthetic heavy chain variable region CDR H2
gatatttcctttgatgcaaataagaaatactatagagattccgtgaagggc

SEQ ID NO: 1207 - protein, 11 aa, Artificial Sequence
  Description of Artificial Sequence: Synthetic heavy chain variable region CDR H3
ARNTIFGVVDY

SEQ ID NO: 1208 - DNA, 33 bp, Artificial Sequence
  Description of Artificial Sequence: Synthetic heavy chain variable region CDR H3
gcgagaaatacgatttttggagtagttgactac

SEQ ID NO: 1209 - DNA, 324 bp, Artificial Sequence
  Description of Artificial Sequence: Synthetic light chain variable region
gaaattgtattgacacagtctccagccaccctgtctgtgtctccaggggaaagagccaccctctcctgcagggccagtcagagtgttagcgccaacttagcctggtaccagcataaacctggccaggctcccaggctcctcatctatggtgcgtccaccagggccagtgatatcccagccaggttcagtggcagtgggtctgggacagagttcactctcaccatcagcagcctgcagtctgaagattctgcagtttattactgtcagcagtataataactggcctccgtggacgttcggccaagggaccaaggtggaaatcaaa

SEQ ID NO: 1210 - protein, 108 aa, Artificial Sequence
  Description of Artificial Sequence: Synthetic light chain variable region
EIVLTQSPATLSVSPGERATLSCRASQSVSANLAWYQHKPGQAPRLLIYGASTRASDIPARFSGSGSGTEFTLTISSLQSEDSAVYYCQQYNNWPPWTFGQGTKVEIK

SEQ ID NO: 1211 - protein, 11 aa, Artificial Sequence
  Description of Artificial Sequence: Synthetic light chain variable region CDR L1
RASQSVSANLA

SEQ ID NO: 1212 - DNA, 33 bp, Artificial Sequence
  Description of Artificial Sequence: Synthetic light chain variable region CDR L1
agggccagtcagagtgttagcgccaacttagcc

SEQ ID NO: 1213 - protein, 7 aa, Artificial Sequence
  Description of Artificial Sequence: Synthetic light chain variable region CDR L2
GASTRAS

SEQ ID NO: 1214 - DNA, 21 bp, Artificial Sequence
  Description of Artificial Sequence: Synthetic light chain variable region CDR L2
ggtgcgtccaccagggccagt

SEQ ID NO: 1215 - protein, 10 aa, Artificial Sequence [sequence omitted]

SEQ ID NO: 1216 - DNA, 30 bp, Artificial Sequence
  Description of Artificial Sequence: Synthetic light chain variable region CDR L3
cagcagtataataactggcctccgtggacg

SEQ ID NO: 1217 - DNA, 366 bp, Artificial Sequence
  Description of Artificial Sequence: Synthetic heavy chain variable region
caggtccagctggtgcagtctggagttgaggtgaagaagcctggggcctcagtgaaggtctcctgcaagacttctggttacacctttagtaattatggtgtcacctgggtgcgacaggcccctggacaagggcttgagtacatgggatggatcagcgcttacaatggtaacacaaactatgcccagaatgtccagggtcgactcaccatgaccacagacacatccacgagcacaggctacatggagttgaggaggctgacatctgacgacacggccgtgtatttctgtgcgagagataaaggtgtaacagtggccggttcattgcttgactactggggccagggaaccctggtcaccgtctcctca

SEQ ID NO: 1218 - protein, 122 aa, Artificial Sequence
  Description of Artificial Sequence: Synthetic heavy chain variable region
QVQLVQSGVEVKKPGASVKVSCKTSGYTFSNYGVTWVRQAPGQGLEYMGWISAYNGNTNYAQNVQGRLTMTTDTSTSTGYMELRRLTSDDTAVYFCARDKGVTVAGSLLDYWGQGTLVTVSS

SEQ ID NO: 1219 - protein, 9 aa, Artificial Sequence
  Description of Artificial Sequence: Synthetic heavy chain variable region CDR H1
YTFSNYGVT

SEQ ID NO: 1220 - DNA, 27 bp, Artificial Sequence
  Description of Artificial Sequence: Synthetic heavy chain variable region CDR H1
tacacctttagtaattatggtgtcacc

SEQ ID NO: 1221 - protein, 17 aa, Artificial Sequence
  Description of Artificial Sequence: Synthetic heavy chain variable region CDR H2
WISAYNGNTNYAQNVQG

SEQ ID NO: 1222 - DNA, 51 bp, Artificial Sequence
  Description of Artificial Sequence: Synthetic heavy chain variable region CDR H2
tggatcagcgcttacaatggtaacacaaactatgcccagaatgtccagggt

SEQ ID NO: 1223 - protein, 15 aa, Artificial Sequence
  Description of Artificial Sequence: Synthetic heavy chain variable region CDR H3
ARDKGVTVAGSLLDY

SEQ ID NO: 1224 - DNA, 45 bp, Artificial Sequence
  Description of Artificial Sequence: Synthetic heavy chain variable region CDR H3
gcgagagataaaggtgtaacagtggccggttcattgcttgactac

SEQ ID NO: 1225 - DNA, 339 bp, Artificial Sequence
  Description of Artificial Sequence: Synthetic light chain variable region
gaaattgtgatgacacagtctccactctccctgcccgtcacccttggacagccggcctccatctcctgcaggtctagtcaaagtctcgaacatagtgatggaaacacctacttgaattggtttcagcagaggccaggccaatctccaaggcgcctcatttataaggtttctaaccgggactctggggtcccagacagattcagcggcagtgggtcaggcactgatttcacactgaaaatcaacagggtggaggctgaggatgttggggtttattactgcatggaaagtacacactggcctccgtacacttttggccaggggaccaaggtggagatcaaa

SEQ ID NO: 1226 - protein, 113 aa, Artificial Sequence
  Description of Artificial Sequence: Synthetic light chain variable region
EIVMTQSPLSLPVTLGQPASISCRSSQSLEHSDGNTYLNWFQQRPGQSPRRLIYKVSNRDSGVPDRFSGSGSGTDFTLKINRVEAEDVGVYYCMESTHWPPYTFGQGTKVEIK

SEQ ID NO: 1227 - protein, 16 aa, Artificial Sequence
  Description of Artificial Sequence: Synthetic light chain variable region CDR L1
RSSQSLEHSDGNTYLN

SEQ ID NO: 1228 - DNA, 48 bp, Artificial Sequence
  Description of Artificial Sequence: Synthetic light chain variable region CDR L1
aggtctagtcaaagtctcgaacatagtgatggaaacacctacttgaat

SEQ ID NO: 1229 - protein, 7 aa, Artificial Sequence
  Description of Artificial Sequence: Synthetic light chain variable region CDR L2
KVSNRDS

SEQ ID NO: 1230 - DNA, 21 bp, Artificial Sequence
  Description of Artificial Sequence: Synthetic light chain variable region CDR L2
aaggtttctaaccgggactct

SEQ ID NO: 1231 - protein, 10 aa, Artificial Sequence
  Description of Artificial Sequence: Synthetic light chain variable region CDR L3
MESTHWPPYT

SEQ ID NO: 1232 - DNA, 30 bp, Artificial Sequence
  Description of Artificial Sequence: Synthetic light chain variable region CDR L3
atggaaagtacacactggcctccgtacact

SEQ ID NO: 1233 - DNA, 360 bp, Artificial Sequence
  Description of Artificial Sequence: Synthetic heavy chain variable region
caggtccagctggtgcagtctggacctgaggtgaagaagcctggggcctcagtgcgggtctcctgcaagacttctggtttcaccttgtcccattatggtgtcagttggctgcggcaggcccctggacacggacttgagtggctgggctggatcagcgcttacaactataacacacaatttggacacagaatggagggcaggctcaccatgaccacagacacttccacagcctatatggacctgacgagcctgacttctgacgacacggccatatattactgtgcgagagattccccttcagacacagcggcagcactccttgacttctggggccagggaaccctggtcaccgtctcctca

SEQ ID NO: 1234 - protein, 120 aa, Artificial Sequence
  Description of Artificial Sequence: Synthetic heavy chain variable region
QVQLVQSGPEVKKPGASVRVSCKTSGFTLSHYGVSWLRQAPGHGLEWLGWISAYNYNTQFGHRMEGRLTMTTDTSTAYMDLTSLTSDDTAIYYCARDSPSDTAAALLDFWGQGTLVTVSS

SEQ ID NO: 1235 - protein, 9 aa, Artificial Sequence
  Description of Artificial Sequence: Synthetic heavy chain variable region CDR H1
FTLSHYGVS

SEQ ID NO: 1236 - DNA, 27 bp, Artificial Sequence
  Description of Artificial Sequence: Synthetic heavy chain variable region CDR H1
ttcaccttgtcccattatggtgtcagt

SEQ ID NO: 1237 - protein, 17 aa, Artificial Sequence
  Description of Artificial Sequence: Synthetic heavy chain variable region CDR H2
WISAYNYNTQFGHRMEG

SEQ ID NO: 1238 - DNA, 51 bp, Artificial Sequence
  Description of Artificial Sequence: Synthetic heavy chain variable region CDR H2
tggatcagcgcttacaactataacacacaatttggacacagaatggagggc

SEQ ID NO: 1239 - protein, 15 aa, Artificial Sequence
  Description of Artificial Sequence: Synthetic heavy chain variable region CDR H3
ARDSPSDTAAALLDF

SEQ ID NO: 1240 - DNA, 45 bp, Artificial Sequence
  Description of Artificial Sequence: Synthetic heavy chain variable region CDR H3
gcgagagattccccttcagacacagcggcagcactccttgacttc

SEQ ID NO: 1241 - DNA, 339 bp, Artificial Sequence
  Description of Artificial Sequence: Synthetic light chain variable region
gatattgtgctgactcagtctcccctctccctgcccgtcactcttggacagccggcctccatctcctgcaggtctagtcaaagcctcgtatacagtgatggcaacacctacttgagttggtttcagcagaggccaggccaagctccaaggcgcctaatttataagatttctaaccgagactctggggtcccagacagattcagcggcagtgggtcaggcactgatttcacactaaagatcagcagggtggaggctgaggatgttgggatttattactgcatgcaagctacacactggcctcgtctcagtttcggcggagggaccaaggtggagatcaaa

SEQ ID NO: 1242 - protein, 113 aa, Artificial Sequence
  Description of Artificial Sequence: Synthetic light chain variable region
DIVLTQSPLSLPVTLGQPASISCRSSQSLVYSDGNTYLSWFQQRPGQAPRRLIYKISNRDSGVPDRFSGSGSGTDFTLKISRVEAEDVGIYYCMQATHWPRLSFGGGTKVEIK

SEQ ID NO: 1243 - protein, 16 aa, Artificial Sequence
  Description of Artificial Sequence: Synthetic light chain variable region CDR L1
RSSQSLVYSDGNTYLS

SEQ ID NO: 1244 - DNA, 48 bp, Artificial Sequence
  Description of Artificial Sequence: Synthetic light chain variable region CDR L1
aggtctagtcaaagcctcgtatacagtgatggcaacacctacttgagt

SEQ ID NO: 1245 - protein, 7 aa, Artificial Sequence
  Description of Artificial Sequence: Synthetic light chain variable region CDR L2
KISNRDS

SEQ ID NO: 1246 - DNA, 21 bp, Artificial Sequence
  Description of Artificial Sequence: Synthetic light chain variable region CDR L2
aagatttctaaccgagactct

SEQ ID NO: 1247 - protein, 10 aa, Artificial Sequence
  Description of Artificial Sequence: Synthetic light chain variable region CDR L3
MQATHWPRLS

SEQ ID NO: 1248 - DNA, 30 bp, Artificial Sequence
  Description of Artificial Sequence: Synthetic light chain variable region CDR L3
atgcaagctacacactggcctcgtctcagt

SEQ ID NO: 1249 - DNA, 354 bp, Artificial Sequence
  Description of Artificial Sequence: Synthetic heavy chain variable region
gaggtgcagctggtggagtctggggctgaaatgaagcagcctggggcctcagtgaaagtctcctgcgagggttttggaaacactctcagtgaaagatccatacactgggtgcgacaggctccaggaaaagggcctgagtggatgggagattatgatcatgaagataaagaagcaatctacgcaccgaagttccagggcagactcacaataagcgcggacatgtctacagacatagcctccttggagctgaacagcctgacatcagaagacacagccgtctattattgtgcgacagtgatcgctgtgggggcttatgacatctggggccagggaaccctggtcaccgtctcctca

SEQ ID NO: 1250 - protein, 118 aa, Artificial Sequence
  Description of Artificial Sequence: Synthetic heavy chain variable region
EVQLVESGAEMKQPGASVKVSCEGFGNTLSERSIHWVRQAPGKGPEWMGDYDHEDKEAIYAPKFQGRLTISADMSTDIASLELNSLTSEDTAVYYCATVIAVGAYDIWGQGTLVTVSS

SEQ ID NO: 1251 - protein, 9 aa, Artificial Sequence
  Description of Artificial Sequence: Synthetic heavy chain variable region CDR H1
NTLSERSIH

SEQ ID NO: 1252 - DNA, 27 bp, Artificial Sequence
  Description of Artificial Sequence: Synthetic heavy chain variable region CDR H1
aacactctcagtgaaagatccatacac

SEQ ID NO: 1253 - protein, 17 aa, Artificial Sequence
  Description of Artificial Sequence: Synthetic heavy chain variable region CDR H2
DYDHEDKEAIYAPKFQG

SEQ ID NO: 1254 - DNA, 51 bp, Artificial Sequence
  Description of Artificial Sequence: Synthetic heavy chain variable region CDR H2
gattatgatcatgaagataaagaagcaatctacgcaccgaagttccagggc

SEQ ID NO: 1255 - protein, 11 aa, Artificial Sequence
  Description of Artificial Sequence: Synthetic heavy chain variable region CDR H3
ATVIAVGAYDI

SEQ ID NO: 1256 - DNA, 33 bp, Artificial Sequence
  Description of Artificial Sequence: Synthetic heavy chain variable region CDR H3
gcgacagtgatcgctgtgggggcttatgacatc

SEQ ID NO: 1257 - DNA, 321 bp, Artificial Sequence
  Description of Artificial Sequence: Synthetic light chain variable region
gaaattgtattgacacagtctccatcctccctgtatgcgtctataggggacagagtcaccatcacttgccggactggtcagagcatttcccggtatttgaattggtatcagcagaaacctgggaaagcccctaaactcctgatctatgcagcatccactttgcaaagtggggtcccatcacgtttcagtggcagtggcgctgggacagatttcactctcaccatcagaggtctgctacctgaagattttgcaacttacttctgtcaacagagttacattatcccctacacttttggccaggggaccaaggtggaaatcaaa

SEQ ID NO: 1258 - protein, 107 aa, Artificial Sequence
  Description of Artificial Sequence: Synthetic light chain variable region
EIVLTQSPSSLYASIGDRVTITCRTGQSISRYLNWYQQKPGKAPKLLIYAASTLQSGVPSRFSGSGAGTDFTLTIRGLLPEDFATYFCQQSYIIPYTFGQGTKVEIK

SEQ ID NO: 1259 - protein, 11 aa, Artificial Sequence
  Description of Artificial Sequence: Synthetic light chain variable region CDR L1
RTGQSISRYLN

SEQ ID NO: 1260 - DNA, 33 bp, Artificial Sequence
  Description of Artificial Sequence: Synthetic light chain variable region CDR L1
cggactggtcagagcatttcccggtatttgaat

SEQ ID NO: 1261 - protein, 7 aa, Artificial Sequence
  Description of Artificial Sequence: Synthetic light chain variable region CDR L2
AASTLQS

SEQ ID NO: 1262 - DNA, 21 bp, Artificial Sequence
  Description of Artificial Sequence: Synthetic light chain variable region CDR L2
gcagcatccactttgcaaagt

SEQ ID NO: 1263 - protein, 9 aa, Artificial Sequence
  Description of Artificial Sequence: Synthetic light chain variable region CDR L3
QQSYIIPYT

SEQ ID NO: 1264 - DNA, 27 bp, Artificial Sequence
  Description of Artificial Sequence: Synthetic light chain variable region CDR L3
caacagagttacattatcccctacact

SEQ ID NO: 1265 - DNA, 366 bp, Artificial Sequence
  Description of Artificial Sequence: Synthetic heavy chain variable region
caggtgcagctacagcagtggggcgcaggactggtgaagccttcggagaccctgtccctcacctgcgctgtgtatggtgggtccttcagtggttaccagtggcactggttccgccagcccccagggaagggtctggagtggattggggaaatcaatcatagtgaaatcacccactacaacgcgtccctcaagagtcgagtcaccctatctattgacacgtccaagaaccaattctccctgaacctgacctctgtgaccgccgcggacacggctgtttattactgtgcgagagcctcgagtgggagctataacttcgaatactggttcgacccctggggccagggaaccctggtcaccgtctcctca

SEQ ID NO: 1266 - protein, 122 aa, Artificial Sequence
  Description of Artificial Sequence: Synthetic heavy chain variable region
QVQLQQWGAGLVKPSETLSLTCAVYGGSFSGYQWHWFRQPPGKGLEWIGEINHSEITHYNASLKSRVTLSIDTSKNQFSLNLTSVTAADTAVYYCARASSGSYNFEYWFDPWGQGTLVTVSS

SEQ ID NO: 1267 - protein, 9 aa, Artificial Sequence
  Description of Artificial Sequence: Synthetic heavy chain variable region CDR H1
GSFSGYQWH

SEQ ID NO: 1268 - DNA, 27 bp, Artificial Sequence
  Description of Artificial Sequence: Synthetic heavy chain variable region CDR H1
gggtccttcagtggttaccagtggcac

SEQ ID NO: 1269 - protein, 16 aa, Artificial Sequence
  Description of Artificial Sequence: Synthetic heavy chain variable region CDR H2
EINHSEITHYNASLKS

SEQ ID NO: 1270 - DNA, 48 bp, Artificial Sequence
  Description of Artificial Sequence: Synthetic heavy chain variable region CDR H2
gaaatcaatcatagtgaaatcacccactacaacgcgtccctcaagagt

SEQ ID NO: 1271 - protein, 16 aa, Artificial Sequence
  Description of Artificial Sequence: Synthetic heavy chain variable region CDR H3
ARASSGSYNFEYWFDP

SEQ ID NO: 1272 - DNA, 48 bp, Artificial Sequence
  Description of Artificial Sequence: Synthetic heavy chain variable region CDR H3
gcgagagcctcgagtgggagctataacttcgaatactggttcgacccc

SEQ ID NO: 1273 - DNA, 324 bp, Artificial Sequence
  Description of Artificial Sequence: Synthetic light chain variable region
cagtctgtgctgacgcagccgccctcggtgtccgtggccccaggaaagacggcctggcttacctgtgggggaaacaacattggcagtaagagagtgcactggtaccggcagaagccaggccaggcccctgtgctggtcgtttatgatgattacgaccggccctcagggacccctgagcgagtctctggctccaactctgggaacacggccaccctgaccatcagcagggtcgaagacggggatgagggcgactattattgtcaggtgtgggatgatcccagtgatcatgcggtgttcggcggcgggaccaagctgaccgtccta

SEQ ID NO: 1274 - protein, 108 aa, Artificial Sequence
  Description of Artificial Sequence: Synthetic light chain variable region
QSVLTQPPSVSVAPGKTAWLTCGGNNIGSKRVHWYRQKPGQAPVLVVYDDYDRPSGTPERVSGSNSGNTATLTISRVEDGDEGDYYCQVWDDPSDHAVFGGGTKLTVL

SEQ ID NO: 1275 - protein, 11 aa, Artificial Sequence
  Description of Artificial Sequence: Synthetic light chain variable region CDR L1
GGNNIGSKRVH

SEQ ID NO: 1276 - DNA, 33 bp, Artificial Sequence
  Description of Artificial Sequence: Synthetic light chain variable region CDR L1
gggggaaacaacattggcagtaagagagtgcac

SEQ ID NO: 1277 - protein, 7 aa, Artificial Sequence
  Description of Artificial Sequence: Synthetic light chain variable region CDR L2
DDYDRPS

SEQ ID NO: 1278 - DNA, 21 bp, Artificial Sequence
  Description of Artificial Sequence: Synthetic light chain variable region CDR L2
gatgattacgaccggccctca

SEQ ID NO: 1279 - protein, 11 aa, Artificial Sequence
  Description of Artificial Sequence: Synthetic light chain variable region CDR L3
QVWDDPSDHAV

SEQ ID NO: 1280 - DNA, 33 bp, Artificial Sequence; identical to SEQ ID NO: 688
  Description of Artificial Sequence: Synthetic light chain variable region CDR L3

SEQ ID NO: 1281 - DNA, 366 bp, Artificial Sequence
  Description of Artificial Sequence: Synthetic heavy chain variable region
caggtccagcttgtgcagtctggaactgaggttaagaagcctggggcctcagtgaaggtctcctgcttgacttctggctacacctttacacactttggtatcagctgggtgcgacaggccccaggacaagggcttgagtggatgggatggttcagcgcttacaatggtaacacaaagtatgcacagaagttccagggcagaatcaccctcaccatagacacatccacgagcatcgcctacttggaactgaggagcctgagatctgacgacacggccgtatattattgtgcgagagaccccccgagtctgacagcagctggtactctggactactggggccagggaaccctggtcaccgtctcctca

SEQ ID NO: 1282 - protein, 122 aa, Artificial Sequence
  Description of Artificial Sequence: Synthetic heavy chain variable region
QVQLVQSGTEVKKPGASVKVSCLTSGYTFTHFGISWVRQAPGQGLEWMGWFSAYNGNTKYAQKFQGRITLTIDTSTSIAYLELRSLRSDDTAVYYCARDPPSLTAAGTLDYWGQGTLVTVSS

SEQ ID NO: 1283 - protein, 9 aa, Artificial Sequence
  Description of Artificial Sequence: Synthetic heavy chain variable region CDR H1
YTFTHFGIS

SEQ ID NO: 1284 - DNA, 27 bp, Artificial Sequence
  Description of Artificial Sequence: Synthetic heavy chain variable region CDR H1
tacacctttacacactttggtatcagc

SEQ ID NO: 1285 - protein, 17 aa, Artificial Sequence
  Description of Artificial Sequence: Synthetic heavy chain variable region CDR H2
WFSAYNGNTKYAQKFQG

SEQ ID NO: 1286 - DNA, 51 bp, Artificial Sequence
  Description of Artificial Sequence: Synthetic heavy chain variable region CDR H2
tggttcagcgcttacaatggtaacacaaagtatgcacagaagttccagggc

SEQ ID NO: 1287 - protein, 15 aa, Artificial Sequence
  Description of Artificial Sequence: Synthetic heavy chain variable region CDR H3
ARDPPSLTAAGTLDY

SEQ ID NO: 1288 - DNA, 45 bp, Artificial Sequence
  Description of Artificial Sequence: Synthetic heavy chain variable region CDR H3
gcgagagaccccccgagtctgacagcagctggtactctggactac

SEQ ID NO: 1289 - DNA, 336 bp, Artificial Sequence
  Description of Artificial Sequence: Synthetic light chain variable region
gacatccggttgacccagtctccactctccctgcccgtcacccttggacagccggcctccatctcctgcagctctaatcaaagcctcgtatacagtgatggaaacacctacttgagttggtttcagcagaggccaggccaatctccaaggcgcctaatttataaggtttctgatcgggactctggggtcccagacagattcagcggcagtgggtcaggcactgatttcacactgaaaatcagcagggtggaggctgaggatgttggggtttattactgcatgcaagctacagactggccccggacgttcggccaagggaccaaggtggagatcaaa

SEQ ID NO: 1290 - protein, 112 aa, Artificial Sequence
  Description of Artificial Sequence: Synthetic light chain variable region
DIRLTQSPLSLPVTLGQPASISCSSNQSLVYSDGNTYLSWFQQRPGQSPRRLIYKVSDRDSGVPDRFSGSGSGTDFTLKISRVEAEDVGVYYCMQATDWPRTFGQGTKVEIK

SEQ ID NO: 1291 - protein, 16 aa, Artificial Sequence
  Description of Artificial Sequence: Synthetic light chain variable region CDR L1
SSNQSLVYSDGNTYLS

SEQ ID NO: 1292 - DNA, 48 bp, Artificial Sequence
  Description of Artificial Sequence: Synthetic light chain variable region CDR L1
agctctaatcaaagcctcgtatacagtgatggaaacacctacttgagt

SEQ ID NO: 1293 - protein, 7 aa, Artificial Sequence
  Description of Artificial Sequence: Synthetic light chain variable region CDR L2
KVSDRDS

SEQ ID NO: 1294 - DNA, 21 bp, Artificial Sequence
  Description of Artificial Sequence: Synthetic light chain variable region CDR L2
aaggtttctgatcgggactct

SEQ ID NO: 1295 - protein, 9 aa, Artificial Sequence
  Description of Artificial Sequence: Synthetic light chain variable region CDR L3
MQATDWPRT

SEQ ID NO: 1296 - DNA, 27 bp, Artificial Sequence
  Description of Artificial Sequence: Synthetic light chain variable region CDR L3
atgcaagctacagactggccccggacg

SEQ ID NO: 1297 - DNA, 357 bp, Artificial Sequence
  Description of Artificial Sequence: Synthetic heavy chain variable region
gaggtgcagctggtggagtctggggctgaggtgaagaagcctggggactcagtgaaggtctcctgcagggcttctggatacagcttcaccggcccctttttgcactgggtgcgacaggcccctggacagcggcttgagcacatgggatggatcaaccctagaagtggtgaaacaaaatatgcacagtcctttctgggcagggtcaccatgaccagggacacgtccattcgctcagccaccttggaattgagtagcctgagatctgacgacacggccgtgtattattgtgcgagagacctctatagcagtggctggctcgacaactggggccagggaaccctggtcaccgtctcctca

SEQ ID NO: 1298 - protein, 119 aa, Artificial Sequence
  Description of Artificial Sequence: Synthetic heavy chain variable region
EVQLVESGAEVKKPGDSVKVSCRASGYSFTGPFLHWVRQAPGQRLEHMGWINPRSGETKYAQSFLGRVTMTRDTSIRSATLELSSLRSDDTAVYYCARDLYSSGWLDNWGQGTLVTVSS

SEQ ID NO: 1299 - protein, 9 aa, Artificial Sequence
  Description of Artificial Sequence: Synthetic heavy chain variable region CDR H1
YSFTGPFLH

SEQ ID NO: 1300 - DNA, 27 bp, Artificial Sequence
  Description of Artificial Sequence: Synthetic heavy chain variable region CDR H1
tacagcttcaccggcccctttttgcac

SEQ ID NO: 1301 - protein, 17 aa, Artificial Sequence
  Description of Artificial Sequence: Synthetic heavy chain variable region CDR H2
WINPRSGETKYAQSFLG

SEQ ID NO: 1302 - DNA, 51 bp, Artificial Sequence
  Description of Artificial Sequence: Synthetic heavy chain variable region CDR H2
tggatcaaccctagaagtggtgaaacaaaatatgcacagtcctttctgggc

SEQ ID NO: 1303 - protein, 12 aa, Artificial Sequence
  Description of Artificial Sequence: Synthetic heavy chain variable region CDR H3
ARDLYSSGWLDN

SEQ ID NO: 1304 - DNA, 36 bp, Artificial Sequence
  Description of Artificial Sequence: Synthetic heavy chain variable region CDR H3
gcgagagacctctatagcagtggctggctcgacaac

SEQ ID NO: 1305 - DNA, 321 bp, Artificial Sequence
  Description of Artificial Sequence: Synthetic light chain variable region
gaaacgacactcacgcagtctccagccaccctgtctgtgtctccaggggaaagggccaccctctcctgcagggccagtcagggtcttagcagcaacttagcctggtaccagcacaaacctggccaggctcccaggctcctcgtctatggtgttgccaccagggccactggtgtcccagccaggttcagtggcagtgggtctgggacagagttcactctcaccatcagcagcctgcagtctgacgattttgcactttattactgtcatcagtataatgactggccctacacttttggccaggggaccaagctggagatcaaa

SEQ ID NO: 1306 - protein, 107 aa, Artificial Sequence
  Description of Artificial Sequence: Synthetic light chain variable region
ETTLTQSPATLSVSPGERATLSCRASQGLSSNLAWYQHKPGQAPRLLVYGVATRATGVPARFSGSGSGTEFTLTISSLQSDDFALYYCHQYNDWPYTFGQGTKLEIK

SEQ ID NO: 1307 - protein, 11 aa, Artificial Sequence
  Description of Artificial Sequence: Synthetic light chain variable region CDR L1
RASQGLSSNLA

SEQ ID NO: 1308 - DNA, 33 bp, Artificial Sequence
  Description of Artificial Sequence: Synthetic light chain variable region CDR L1
agggccagtcagggtcttagcagcaacttagcc

SEQ ID NO: 1309 - protein, 7 aa, Artificial Sequence
  Description of Artificial Sequence: Synthetic light chain variable region CDR L2
GVATRAT

SEQ ID NO: 1310 - DNA, 21 bp, Artificial Sequence
  Description of Artificial Sequence: Synthetic light chain variable region CDR L2
ggtgttgccaccagggccact

SEQ ID NO: 1311 - protein, 9 aa, Artificial Sequence
  Description of Artificial Sequence: Synthetic light chain variable region CDR L3
HQYNDWPYT

SEQ ID NO: 1312 - DNA, 27 bp, Artificial Sequence
  Description of Artificial Sequence: Synthetic light chain variable region CDR L3
catcagtataatgactggccctacact

SEQ ID NO: 1313 - DNA, 384 bp, Artificial Sequence
  Description of Artificial Sequence: Synthetic heavy chain variable region
gaggtgcagctggtggagtctgggggaggcttggtaaagcctggggggtccctaagactctcatgtgcagcctctggattcatcttccgcaacgcctggatgagctgggtccgccaggctccagggaaggggctggagtgggttggccggattaaaaggacaagtgaaggtgggtcagtcgactacgcgacacccgtgcaaggcagattctccatctcaagagatgattctagaaacacgctgtatctgcaaatgaacagcctggaaaccgacgacacagccgtgtattactgttccacaggcccaccctactcttactttgatagtagtggttattcggtcgtggactactggggccagggaaccctggtcaccgtctcctca

SEQ ID NO: 1314 - protein, 128 aa, Artificial Sequence
  Description of Artificial Sequence: Synthetic heavy chain variable region
EVQLVESGGGLVKPGGSLRLSCAASGFIFRNAWMSWVRQAPGKGLEWVGRIKRTSEGGSVDYATPVQGRFSISRDDSRNTLYLQMNSLETDDTAVYYCSTGPPYSYFDSSGYSVVDYWGQGTLVTVSS

SEQ ID NO: 1315 - protein, 9 aa, Artificial Sequence
  Description of Artificial Sequence: Synthetic heavy chain variable region CDR H1
FIFRNAWMS

SEQ ID NO: 1316 - DNA, 27 bp, Artificial Sequence
  Description of Artificial Sequence: Synthetic heavy chain variable region CDR H1
ttcatcttccgcaacgcctggatgagc

SEQ ID NO: 1317 - protein, 19 aa, Artificial Sequence
  Description of Artificial Sequence: Synthetic heavy chain variable region CDR H2
RIKRTSEGGSVDYATPVQG

SEQ ID NO: 1318 - DNA, 57 bp, Artificial Sequence
  Description of Artificial Sequence: Synthetic heavy chain variable region CDR H2
cggattaaaaggacaagtgaaggtgggtcagtcgactacgcgacacccgtgcaaggc

SEQ ID NO: 1319 - protein, 19 aa, Artificial Sequence
  Description of Artificial Sequence: Synthetic heavy chain variable region CDR H3
STGPPYSYFDSSGYSVVDY

SEQ ID NO: 1320 - DNA, 57 bp, Artificial Sequence
  Description of Artificial Sequence: Synthetic heavy chain variable region CDR H3
tccacaggcccaccctactcttactttgatagtagtggttattcggtcgtggactac

SEQ ID NO: 1321 - DNA, 330 bp, Artificial Sequence
  Description of Artificial Sequence: Synthetic light chain variable region
cagtctgtgttgacgcagccgccctcagcgtctgggacccccgggcagagggtcaccatctcttgttctgcaagcagctccaacatcggagataattatttctactggtaccaacaactcccaggaaaggcccccacactcctcatgtatggtagtgatcagcggtcctcaggggtccctgaccgattctctggctcccagtctggcacctctgcctccctggccatcagtgggctccggtccgaggatgaagctgattattattgtgcagcttgggatgacagcctgagtggtccggtgttcggcggagggaccaagctgaccgtccta

SEQ ID NO: 1322 - protein, 110 aa, Artificial Sequence
  Description of Artificial Sequence: Synthetic light chain variable region
QSVLTQPPSASGTPGQRVTISCSASSSNIGDNYFYWYQQLPGKAPTLLMYGSDQRSSGVPDRFSGSQSGTSASLAISGLRSEDEADYYCAAWDDSLSGPVFGGGTKLTVL

SEQ ID NO: 1323 - protein, 13 aa, Artificial Sequence
  Description of Artificial Sequence: Synthetic light chain variable region CDR L1
SASSSNIGDNYFY

SEQ ID NO: 1324 - DNA, 39 bp, Artificial Sequence; identical to SEQ ID NO: 204
  Description of Artificial Sequence: Synthetic light chain variable region CDR L1

SEQ ID NO: 1325 - protein, 7 aa, Artificial Sequence
  Description of Artificial Sequence: Synthetic light chain variable region CDR L2
GSDQRSS

SEQ ID NO: 1326 - DNA, 21 bp, Artificial Sequence
  Description of Artificial Sequence: Synthetic light chain variable region CDR L2
ggtagtgatcagcggtcctca

SEQ ID NO: 1327 - protein, 11 aa, Artificial Sequence
  Description of Artificial Sequence: Synthetic light chain variable region CDR L3
AAWDDSLSGPV

SEQ ID NO: 1328 - DNA, 33 bp, Artificial Sequence; identical to SEQ ID NO: 208
  Description of Artificial Sequence: Synthetic light chain variable region CDR L3

SEQ ID NO: 1329 - DNA, 366 bp, Artificial Sequence
  Description of Artificial Sequence: Synthetic heavy chain variable region
gaggtgcagctggtggagtctgggggaggcttggtacagcctggggggtccctgagactctcgtgtgcagcctctggattctccttcagtgactacagcatgaactgggtccgccaggctccagggaaggggctggagtgggtttcatatattactcctagtagtagaaataaattctatgcagactctgtgaggggccgattcaccatctccagagacaatgccgagaattcactgtatctgcaaatgaacagcctgagagtcgaagacacggctgtttattactgtgtcagaagtttgcattggggcgccgcgatcgagagatgggacgtctggggccaagggaccacggtcaccgtctcctca

SEQ ID NO: 1330 - protein, 122 aa, Artificial Sequence
  Description of Artificial Sequence: Synthetic heavy chain variable region
EVQLVESGGGLVQPGGSLRLSCAASGFSFSDYSMNWVRQAPGKGLEWVSYITPSSRNKFYADSVRGRFTISRDNAENSLYLQMNSLRVEDTAVYYCVRSLHWGAAIERWDVWGQGTTVTVSS

SEQ ID NO: 1331 - protein, 9 aa, Artificial Sequence
  Description of Artificial Sequence: Synthetic heavy chain variable region CDR H1
FSFSDYSMN

SEQ ID NO: 1332 - DNA, 27 bp, Artificial Sequence
  Description of Artificial Sequence: Synthetic heavy chain variable region CDR H1
ttctccttcagtgactacagcatgaac

SEQ ID NO: 1333 - protein, 17 aa, Artificial Sequence
  Description of Artificial Sequence: Synthetic heavy chain variable region CDR H2
YITPSSRNKFYADSVRG

SEQ ID NO: 1334 - DNA, 51 bp, Artificial Sequence
  Description of Artificial Sequence: Synthetic heavy chain variable region CDR H2
tatattactcctagtagtagaaataaattctatgcagactctgtgaggggc

SEQ ID NO: 1335 - protein, 15 aa, Artificial Sequence
  Description of Artificial Sequence: Synthetic heavy chain variable region CDR H3
VRSLHWGAAIERWDV

SEQ ID NO: 1336 - DNA, 45 bp, Artificial Sequence
  Description of Artificial Sequence: Synthetic heavy chain variable region CDR H3
gtcagaagtttgcattggggcgccgcgatcgagagatgggacgtc

SEQ ID NO: 1337 - DNA, 324 bp, Artificial Sequence
  Description of Artificial Sequence: Synthetic light chain variable region
gaaattgtattgacgcagtctccaggcaccctgtcgttgtctccaggggaaagagccaccctctcctgcagggccagtcagagtattagcagcagcttctttgcctggtaccagcagacacctggccaggcccccagactcctcatgtatgctacatccagcagggccactggcatcccagacaggttcagtggcagtgggtctgggacagacttcactctcaccatcagcagagtggagcctgaagattttgcagtgtattactgtcagcagtctggcagttcaccgtacacttttggccaggggaccaaggtggaaatcaaa

SEQ ID NO: 1338 - protein, 108 aa, Artificial Sequence
  Description of Artificial Sequence: Synthetic light chain variable region
EIVLTQSPGTLSLSPGERATLSCRASQSISSSFFAWYQQTPGQAPRLLMYATSSRATGIPDRFSGSGSGTDFTLTISRVEPEDFAVYYCQQSGSSPYTFGQGTKVEIK

SEQ ID NO: 1339 - protein, 12 aa, Artificial Sequence
  Description of Artificial Sequence: Synthetic light chain variable region CDR L1
RASQSISSSFFA

SEQ ID NO: 1340 - DNA, 36 bp, Artificial Sequence
  Description of Artificial Sequence: Synthetic light chain variable region CDR L1
agggccagtcagagtattagcagcagcttctttgcc

SEQ ID NO: 1341 - protein, 7 aa, Artificial Sequence
  Description of Artificial Sequence: Synthetic light chain variable region CDR L2
ATSSRAT

SEQ ID NO: 1342 - DNA, 21 bp, Artificial Sequence
  Description of Artificial Sequence: Synthetic light chain variable region CDR L2
gctacatccagcagggccact

SEQ ID NO: 1343 - protein, 9 aa, Artificial Sequence
  Description of Artificial Sequence: Synthetic light chain variable region CDR L3
QQSGSSPYT

SEQ ID NO: 1344 - DNA, 27 bp, Artificial Sequence
  Description of Artificial Sequence: Synthetic light chain variable region CDR L3
cagcagtctggcagttcaccgtacact

SEQ ID NO: 1345 - DNA, 351 bp, Artificial Sequence
  Description of Artificial Sequence: Synthetic heavy chain variable region
gaggtgcagctgttggagtcggggggaggcgtggtccagcctgggaggtccctgagactctcctgtacagcctctggattcaccttcagtgaccatgctatgtactgggtccgccaggctccaggcaaagggctagagtgggtggcacttatatcatttgatggaaggaatatatactacgcagactccgtgaagggccgattcaccatctccagagacaattccaagaacacgctgtatctgcagatgaacagcctgagagctgaggacacggctgtctattactgtgcgagagatcaatggctggttcctgactactggggccagggaaccctggtcaccgtctcctca

SEQ ID NO: 1346 - protein, 117 aa, Artificial Sequence
  Description of Artificial Sequence: Synthetic heavy chain variable region
EVQLLESGGGVVQPGRSLRLSCTASGFTFSDHAMYWVRQAPGKGLEWVALISFDGRNIYYADSVKGRFTISRDNSKNTLYLQMNSLRAEDTAVYYCARDQWLVPDYWGQGTLVTVSS

SEQ ID NO: 1347 - protein, 9 aa, Artificial Sequence
  Description of Artificial Sequence: Synthetic heavy chain variable region CDR H1
FTFSDHAMY

SEQ ID NO: 1348 - DNA, 27 bp, Artificial Sequence
  Description of Artificial Sequence: Synthetic heavy chain variable region CDR H1
ttcaccttcagtgaccatgctatgtac

SEQ ID NO: 1349 - protein, 17 aa, Artificial Sequence
  Description of Artificial Sequence: Synthetic heavy chain variable region CDR H2
LISFDGRNIYYADSVKG

SEQ ID NO: 1350 - DNA, 51 bp, Artificial Sequence; identical to SEQ ID NO: 374
  Description of Artificial Sequence: Synthetic heavy chain variable region CDR H2

SEQ ID NO: 1351 - protein, 10 aa, Artificial Sequence
  Description of Artificial Sequence: Synthetic heavy chain variable region CDR H3
ARDQWLVPDY

SEQ ID NO: 1352 - DNA, 30 bp, Artificial Sequence; identical to SEQ ID NO: 376
  Description of Artificial Sequence: Synthetic heavy chain variable region CDR H3

SEQ ID NO: 1353 - DNA, 327 bp, Artificial Sequence
  Description of Artificial Sequence: Synthetic light chain variable region
cagtctgttctgattcagcctgcctccgtgtctgggtctcctggacagtcgatcaccatctcctgcactggaaccagcagtgacgttggtggttataactatgtctcctggtaccaacagcacccaggcaacgcccccaaactcatgatttatgaagtcagtaagcggccctcaggggtccctgatcgcttctctggcttcaagtctggcaacacggcctccctgaccgtctctgggctccaggctgaggatgaggctgattattactgcagctcatatgcaggcagcaacagtgtcttcggaactggcacccagctgaccgtcctc

SEQ ID NO: 1354 - protein, 109 aa, Artificial Sequence
  Description of Artificial Sequence: Synthetic light chain variable region
QSVLIQPASVSGSPGQSITISCTGTSSDVGGYNYVSWYQQHPGNAPKLMIYEVSKRPSGVPDRFSGFKSGNTASLTVSGLQAEDEADYYCSSYAGSNSVFGTGTQLTVL

SEQ ID NO: 1355 - protein, 14 aa, Artificial Sequence
  Description of Artificial Sequence: Synthetic light chain variable region CDR L1
TGTSSDVGGYNYVS

SEQ ID NO: 1356 - DNA, 42 bp, Artificial Sequence; identical to SEQ ID NO: 380
  Description of Artificial Sequence: Synthetic light chain variable region CDR L1

SEQ ID NO: 1357 - protein, 7 aa, Artificial Sequence
  Description of Artificial Sequence: Synthetic light chain variable region CDR L2
EVSKRPS

SEQ ID NO: 1358 - DNA, 21 bp, Artificial Sequence
  Description of Artificial Sequence: Synthetic light chain variable region CDR L2
gaagtcagtaagcggccctca

SEQ ID NO: 1359 - protein, 9 aa, Artificial Sequence
  Description of Artificial Sequence: Synthetic light chain variable region CDR L3
SSYAGSNSV

SEQ ID NO: 1360 - DNA, 27 bp, Artificial Sequence
  Description of Artificial Sequence: Synthetic light chain variable region CDR L3
agctcatatgcaggcagcaacagtgtc

SEQ ID NO: 1361 - DNA, 366 bp, Artificial Sequence
  Description of Artificial Sequence: Synthetic heavy chain variable region
gaggtgcagctggtggagtcgggcccaggactagttaggccttcacagaccctgtccataaagtgcagtgtctctggcggctccatcaatagaggtgcttacttctggacctggatccgccagcgcccagggaagggcctggagtggattgggtccatccatgacaccggcagctactacaacccgtccctcaagacacgagtttccatctccggggacacgtctaaaaacctcttcaccctggagttgacctcgctgactgccgcggacacggccgtgtattactgtgcgagggggcgtggatacagctatggctggcgttactttgactcctggggccagggaaccctggtcaccgtctcctca

SEQ ID NO: 1362 - protein, 122 aa, Artificial Sequence
  Description of Artificial Sequence: Synthetic heavy chain variable region
EVQLVESGPGLVRPSQTLSIKCSVSGGSINRGAYFWTWIRQRPGKGLEWIGSIHDTGSYYNPSLKTRVSISGDTSKNLFTLELTSLTAADTAVYYCARGRGYSYGWRYFDSWGQGTLVTVSS

SEQ ID NO: 1363 - protein, 11 aa, Artificial Sequence
  Description of Artificial Sequence: Synthetic heavy chain variable region CDR H1
GSINRGAYFWT

SEQ ID NO: 1364 - DNA, 33 bp, Artificial Sequence
  Description of Artificial Sequence: Synthetic heavy chain variable region CDR H1
ggctccatcaatagaggtgcttacttctggacc

SEQ ID NO: 1365 - protein, 15 aa, Artificial Sequence
  Description of Artificial Sequence: Synthetic heavy chain variable region CDR H2
SIHDTGSYYNPSLKT

SEQ ID NO: 1366 - DNA, 45 bp, Artificial Sequence
  Description of Artificial Sequence: Synthetic heavy chain variable region CDR H2
tccatccatgacaccggcagctactacaacccgtccctcaagaca

SEQ ID NO: 1367 - protein, 15 aa, Artificial Sequence
  Description of Artificial Sequence: Synthetic heavy chain variable region CDR H3
ARGRGYSYGWRYFDS

SEQ ID NO: 1368 - DNA, 45 bp, Artificial Sequence
  Description of Artificial Sequence: Synthetic heavy chain variable region CDR H3
gcgagggggcgtggatacagctatggctggcgttactttgactcc

SEQ ID NO: 1369 - DNA, 324 bp, Artificial Sequence
  Description of Artificial Sequence: Synthetic light chain variable region
tcctatgtgctgactcagccaccctcggtgtcagtgtctccaggacagacggccaggatcacctgctctggcgatgcattcccaagacaatattcttattggtaccagcagaaggcaggccagccccctgtgttggtaatattgaaagactctgagaggccctcagggatccctgcgcgattctctggctccacctcagggacaacagtcaccttgaccatcactggagtccaggcagaagacgaggcagactattactgtcaatcatcggacagcagtggaaattatgtggtgttcggcggagggaccaagctcaccgtccta

SEQ ID NO: 1370 - protein, 108 aa, Artificial Sequence
  Description of Artificial Sequence: Synthetic light chain variable region
SYVLTQPPSVSVSPGQTARITCSGDAFPRQYSYWYQQKAGQPPVLVILKDSERPSGIPARFSGSTSGTTVTLTITGVQAEDEADYYCQSSDSSGNYVVFGGGTKLTVL

SEQ ID NO: 1371 - protein, 11 aa, Artificial Sequence
  Description of Artificial Sequence: Synthetic light chain variable region CDR L1
SGDAFPRQYSY

SEQ ID NO: 1372 - DNA, 33 bp, Artificial Sequence
  Description of Artificial Sequence: Synthetic light chain variable region CDR L1
tctggcgatgcattcccaagacaatattcttat

SEQ ID NO: 1373 - protein, 7 aa, Artificial Sequence
  Description of Artificial Sequence: Synthetic light chain variable region CDR L2
KDSERPS

SEQ ID NO: 1374 - DNA, 21 bp, Artificial Sequence
  Description of Artificial Sequence: Synthetic light chain variable region CDR L2
aaagactctgagaggccctca

SEQ ID NO: 1375 - protein, 11 aa, Artificial Sequence
  Description of Artificial Sequence: Synthetic light chain variable region CDR L3
QSSDSSGNYVV

SEQ ID NO: 1376 - DNA, 33 bp, Artificial Sequence
  Description of Artificial Sequence: Synthetic light chain variable region CDR L3
caatcatcggacagcagtggaaattatgtggtg

SEQ ID NO: 1377 - DNA, 384 bp, Artificial Sequence
  Description of Artificial Sequence: Synthetic heavy chain variable region
caggtccagcttgtgcagtctggggctgaattgaagaggcctgggtcatcggtgaaggtctcctgcaaggcttcaggggtctatttgacctcggttgctgtcaactgggtgcgacaggtccctggacatgggttcgagtggatgggtgggatactcactggctttggtaaagtcagacacgcccaggcctttgagaaccgtgccacgctcaccgcggacgcgtcgaccaacacagcctacttggagttgagcggacttcaagctgaagacacggccgcctattattgtgcgataatcgacccccaagattgtacggccgccagctgcttttgggtcaactggctcgacccctggggccagggaaccctggtcaccgtctcctca

SEQ ID NO: 1378 - protein, 128 aa, Artificial Sequence
  Description of Artificial Sequence: Synthetic heavy chain variable region
QVQLVQSGAELKRPGSSVKVSCKASGVYLTSVAVNWVRQVPGHGFEWMGGILTGFGKVRHAQAFENRATLTADASTNTAYLELSGLQAEDTAAYYCAIIDPQDCTAASCFWVNWLDPWGQGTLVTVSS

SEQ ID NO: 1379 - protein, 9 aa, Artificial Sequence
  Description of Artificial Sequence: Synthetic heavy chain variable region CDR H1
VYLTSVAVN

SEQ ID NO: 1380 - DNA, 27 bp, Artificial Sequence
  Description of Artificial Sequence: Synthetic heavy chain variable region CDR H1
gtctatttgacctcggttgctgtcaac

SEQ ID NO: 1381 - protein, 17 aa, Artificial Sequence
  Description of Artificial Sequence: Synthetic heavy chain variable region CDR H2
GILTGFGKVRHAQAFEN

SEQ ID NO: 1382 - DNA, 51 bp, Artificial Sequence
  Description of Artificial Sequence: Synthetic heavy chain variable region CDR H2
gggatactcactggctttggtaaagtcagacacgcccaggcctttgagaac

SEQ ID NO: 1383 - protein, 21 aa, Artificial Sequence
  Description of Artificial Sequence: Synthetic heavy chain variable region CDR H3
AIIDPQDCTAASCFWVNWLDP

SEQ ID NO: 1384 - DNA, 63 bp, Artificial Sequence
  Description of Artificial Sequence: Synthetic heavy chain variable region CDR H3
gcgataatcgacccccaagattgtacggccgccagctgcttttgggtcaactggctcgacccc

SEQ ID NO: 1385 - DNA, 324 bp, Artificial Sequence
  Description of Artificial Sequence: Synthetic light chain variable region
gaaattgtattgacacagtctccaggcaccctgaccgtgtctccaggggagagagccaccctctcctgcagggccagtcagagtgttcttagtagtcacttagcctggtaccagcagaaacctggccaggctcccaggctcctcatctatgctgcatccagtagggccactgacgtcccagacaggttcagtggcagtgggtctgggacagacttcactctcaccatcagcagactggagcctcaagattttgcagtctattactgtcagcagtatggttcctctccgatcaccttcggccaagggacacgactggagattaaa

SEQ ID NO: 1386 - protein, 108 aa, Artificial Sequence
  Description of Artificial Sequence: Synthetic light chain variable region
EIVLTQSPGTLTVSPGERATLSCRASQSVLSSHLAWYQQKPGQAPRLLIYAASSRATDVPDRFSGSGSGTDFTLTISRLEPQDFAVYYCQQYGSSPITFGQGTRLEIK

SEQ ID NO: 1387 - protein, 12 aa, Artificial Sequence
  Description of Artificial Sequence: Synthetic light chain variable region CDR L1
RASQSVLSSHLA

SEQ ID NO: 1388 - DNA, 36 bp, Artificial Sequence
  Description of Artificial Sequence: Synthetic light chain variable region CDR L1
agggccagtcagagtgttcttagtagtcacttagcc

SEQ ID NO: 1389 - protein, 7 aa, Artificial Sequence
  Description of Artificial Sequence: Synthetic light chain variable region CDR L2
AASSRAT

SEQ ID NO: 1390 - DNA, 21 bp, Artificial Sequence
  Description of Artificial Sequence: Synthetic light chain variable region CDR L2
gctgcatccagtagggccact

SEQ ID NO: 1391 - protein, 9 aa, Artificial Sequence
  Description of Artificial Sequence: Synthetic light chain variable region CDR L3
QQYGSSPIT

SEQ ID NO: 1392 - DNA, 27 bp, Artificial Sequence
  Description of Artificial Sequence: Synthetic light chain variable region CDR L3
cagcagtatggttcctctccgatcacc

SEQ ID NO: 1393 - DNA, 378 bp, Artificial Sequence
  Description of Artificial Sequence: Synthetic heavy chain variable region
caggtccagctggtgcagtctggggctgaggtgaagaagcctgggtcctcggtgaaggtctcctgtaaggttgccggaggttccttctccaattatgcaatcgcctggctgcgacaggcccctggacaagggcttgagtggatgggagggatcatacctgcctttaatagagcaatgtatgcacggaagttccaagacagagtcacaattaccgcgtacgcatcaacgaccactgcctacctggacattaccggcctcagatctgaggacacggccctttattattgtgcgaggcctgctggagactttggggatttaaagtgggtacgatcgccttttgactactggggccagggaaccctggtcaccgtctcctca

SEQ ID NO: 1394 - protein, 126 aa, Artificial Sequence
  Description of Artificial Sequence: Synthetic heavy chain variable region
QVQLVQSGAEVKKPGSSVKVSCKVAGGSFSNYAIAWLRQAPGQGLEWMGGIIPAFNRAMYARKFQDRVTITAYASTTTAYLDITGLRSEDTALYYCARPAGDFGDLKWVRSPFDYWGQGTLVTVSS

SEQ ID NO: 1395 - protein, 9 aa, Artificial Sequence
  Description of Artificial Sequence: Synthetic heavy chain variable region CDR H1
GSFSNYAIA

SEQ ID NO: 1396 - DNA, 27 bp, Artificial Sequence
  Description of Artificial Sequence: Synthetic heavy chain variable region CDR H1
ggttccttctccaattatgcaatcgcc

SEQ ID NO: 1397 - protein, 17 aa, Artificial Sequence
  Description of Artificial Sequence: Synthetic heavy chain variable region CDR H2
GIIPAFNRAMYARKFQD

SEQ ID NO: 1398 - DNA, 51 bp, Artificial Sequence
  Description of Artificial Sequence: Synthetic heavy chain variable region CDR H2
gggatcatacctgcctttaatagagcaatgtatgcacggaagttccaagac

SEQ ID NO: 1399 - protein, 19 aa, Artificial Sequence
  Description of Artificial Sequence: Synthetic heavy chain variable region CDR H3
ARPAGDFGDLKWVRSPFDY

SEQ ID NO: 1400 - DNA, 57 bp, Artificial Sequence; identical to SEQ ID NO: 1064
  Description of Artificial Sequence: Synthetic heavy chain variable region CDR H3

SEQ ID NO: 1401 - DNA, 327 bp, Artificial Sequence
  Description of Artificial Sequence: Synthetic light chain variable region
gaaacgacactcacgcagtctccaggcaccctgtctgtgtctccaggggaaagagccaccctctcctgcagggccagtcaggaagttggcatcaacttagcctggtatcagcagaaacctggccaggctcccaggctcctcatatatggtgcatccaccagggccactgatgtcccagccaggttcagtggcagtgggtctgggacagagttcactctcaccatcagcagcctgcagtctgaagattttgcagtttattattgtcaggagtataatgactggcctccccagctcactttcggccctgggaccaaagtggatatcaaa

SEQ ID NO: 1402 - protein, 109 aa, Artificial Sequence
  Description of Artificial Sequence: Synthetic light chain variable region
ETTLTQSPGTLSVSPGERATLSCRASQEVGINLAWYQQKPGQAPRLLIYGASTRATDVPARFSGSGSGTEFTLTISSLQSEDFAVYYCQEYNDWPPQLTFGPGTKVDIK

SEQ ID NO: 1403 - protein, 11 aa, Artificial Sequence
  Description of Artificial Sequence: Synthetic light chain variable region CDR L1
RASQEVGINLA

SEQ ID NO: 1404 - DNA, 33 bp, Artificial Sequence
  Description of Artificial Sequence: Synthetic light chain variable region CDR L1
agggccagtcaggaagttggcatcaacttagcc

SEQ ID NO: 1405 - protein, 7 aa, Artificial Sequence
  Description of Artificial Sequence: Synthetic light chain variable region CDR L2
GASTRAT

SEQ ID NO: 1406 - DNA, 21 bp, Artificial Sequence
  Description of Artificial Sequence: Synthetic light chain variable region CDR L2
ggtgcatccaccagggccact

SEQ ID NO: 1407 - protein, 11 aa, Artificial Sequence
  Description of Artificial Sequence: Synthetic light chain variable region CDR L3
QEYNDWPPQLT

SEQ ID NO: 1408 - DNA, 33 bp, Artificial Sequence
  Description of Artificial Sequence: Synthetic light chain variable region CDR L3
caggagtataatgactggcctccccagctcact

SEQ ID NO: 1409 - DNA, 384 bp, Artificial Sequence
  Description of Artificial Sequence: Synthetic heavy chain variable region
gaggtgcagctggtggagtctgggggaggcttggtaaagcctggggggtccctaagactctcatgtgcagcctctggattcatcttccgcaacgcctggatgagctgggtccgccaggctccagggaaggggctggagtgggttggccggattaaaaggacaagtgaaggtgggtcagtcgactacgcgacacccgtgcaaggcagattctccatctcaagagatgattctagaaacacgctgtatctgcaaatgaacagcctggaaaccgacgacacagccgtgtattactgttccacaggcccaccctattcttactttgatagtagtggttattcggtcgtggactactggggccagggaaccctggtcaccgtctcctca

SEQ ID NO: 1410 - protein, 128 aa, Artificial Sequence; identical to SEQ ID NO: 1314
  Description of Artificial Sequence: Synthetic heavy chain variable region

SEQ ID NO: 1411 - protein, 9 aa, Artificial Sequence
  Description of Artificial Sequence: Synthetic heavy chain variable region CDR H1
FIFRNAWMS

SEQ ID NO: 1412 - DNA, 27 bp, Artificial Sequence
  Description of Artificial Sequence: Synthetic heavy chain variable region CDR H1
ttcatcttccgcaacgcctggatgagc

SEQ ID NO: 1413 - protein, 19 aa, Artificial Sequence
  Description of Artificial Sequence: Synthetic heavy chain variable region CDR H2
RIKRTSEGGSVDYATPVQG

SEQ ID NO: 1414 - DNA, 57 bp, Artificial Sequence; identical to SEQ ID NO: 1318
  Description of Artificial Sequence: Synthetic heavy chain variable region CDR H2

SEQ ID NO: 1415 - protein, 19 aa, Artificial Sequence
  Description of Artificial Sequence: Synthetic heavy chain variable region CDR H3
STGPPYSYFDSSGYSVVDY

SEQ ID NO: 1416 - DNA, 57 bp, Artificial Sequence
  Description of Artificial Sequence: Synthetic heavy chain variable region CDR H3
tccacaggcccaccctattcttactttgatagtagtggttattcggtcgtggactac

SEQ ID NO: 1417 - DNA, 333 bp, Artificial Sequence
  Description of Artificial Sequence: Synthetic light chain variable region
cagtctgtcgtgacgcagccgccctcagtgtctgggacccccgggcagagggtcaccatctcctgcactgggagctcctccaacatcgggacaccttttgatgtacactggtaccagcagattccagagacagcccccaaactcatcatatctggtggtttcagtcggccctcaggggtccctgaccgattctctggctcccagtctggcacctctgcctccctggccatcagtgggctccggtccgaggatgaaggtgattattattgtgcagcttgggatgacagcctgagtggtccggtgttcggcggagggaccaagctcaccgtccta

SEQ ID NO: 1418 - protein, 111 aa, Artificial Sequence
  Description of Artificial Sequence: Synthetic light chain variable region
QSVVTQPPSVSGTPGQRVTISCTGSSSNIGTPFDVHWYQQIPETAPKLIISGGFSRPSGVPDRFSGSQSGTSASLAISGLRSEDEGDYYCAAWDDSLSGPVFGGGTKLTVL

SEQ ID NO: 1419 - protein, 14 aa, Artificial Sequence
  Description of Artificial Sequence: Synthetic light chain variable region CDR L1
TGSSSNIGTPFDVH

SEQ ID NO: 1420 - DNA, 42 bp, Artificial Sequence
  Description of Artificial Sequence: Synthetic light chain variable region CDR L1
actgggagctcctccaacatcgggacaccttttgatgtacac

SEQ ID NO: 1421 - protein, 7 aa, Artificial Sequence
  Description of Artificial Sequence: Synthetic light chain variable region CDR L2
GGFSRPS

SEQ ID NO: 1422 - DNA, 21 bp, Artificial Sequence
  Description of Artificial Sequence: Synthetic light chain variable region CDR L2
ggtggtttcagtcggccctca

SEQ ID NO: 1423 - protein, 11 aa, Artificial Sequence
  Description of Artificial Sequence: Synthetic light chain variable region CDR L3
AAWDDSLSGPV

SEQ ID NO: 1424 - DNA, 33 bp, Artificial Sequence; identical to SEQ ID NO: 208
  Description of Artificial Sequence: Synthetic light chain variable region CDR L3

SEQ ID NO: 1425 - DNA, 378 bp, Artificial Sequence
  Description of Artificial Sequence: Synthetic heavy chain variable region
caggtgcagctggtgcagtctggggctgaggtgaagaagcctgggtcctcggtgaaggtctcctgtaaggttgtcggaggcagtttcagcaactatgggattggctgggtgcgacaggcccctggacaagggcctgagtggatgggagggatcatccctgcctttaagacagcaaaatatgcaaagaagttccaggacagagtcacaattaccgcggacgaatcttcgagcactgcctacatggaggtgagaggcctcagacctgacgacacggccctgtattattgtgcgaggcctgaaggagactttggagatttgaagtgggtacgatcgccttttgactactggggccagggaaccctggtcaccgtctcctca

SEQ ID NO: 1426 - protein, 126 aa, Artificial Sequence
  Description of Artificial Sequence: Synthetic heavy chain variable region
QVQLVQSGAEVKKPGSSVKVSCKVVGGSFSNYGIGWVRQAPGQGPEWMGGIIPAFKTAKYAKKFQDRVTITADESSSTAYMEVRGLRPDDTALYYCARPEGDFGDLKWVRSPFDYWGQGTLVTVSS

SEQ ID NO: 1427 - protein, 9 aa, Artificial Sequence
  Description of Artificial Sequence: Synthetic heavy chain variable region CDR H1
GSFSNYGIG

SEQ ID NO: 1428 - DNA, 27 bp, Artificial Sequence
  Description of Artificial Sequence: Synthetic heavy chain variable region CDR H1
ggcagtttcagcaactatgggattggc

SEQ ID NO: 1429 - protein, 17 aa, Artificial Sequence
  Description of Artificial Sequence: Synthetic heavy chain variable region CDR H2
GIIPAFKTAKYAKKFQD

SEQ ID NO: 1430 - DNA, 51 bp, Artificial Sequence
  Description of Artificial Sequence: Synthetic heavy chain variable region CDR H2
gggatcatccctgcctttaagacagcaaaatatgcaaagaagttccaggac

SEQ ID NO: 1431 - protein, 19 aa, Artificial Sequence
  Description of Artificial Sequence: Synthetic heavy chain variable region CDR H3
ARPEGDFGDLKWVRSPFDY

SEQ ID NO: 1432 - DNA, 57 bp, Artificial Sequence
  Description of Artificial Sequence: Synthetic heavy chain variable region CDR H3
gcgaggcctgaaggagactttggagatttgaagtgggtacgatcgccttttgactac

SEQ ID NO: 1433 - DNA, 327 bp, Artificial Sequence
  Description of Artificial Sequence: Synthetic light chain variable region
gaaacgacactcacgcagtctccagccaccctgtctgtgtctccaggggaaagagtcaccctctcctgcagggccagtcaggatgttagcatcaacttagcctggtaccagcagaaacctggccaggctcccaggctcctcatctatggtgcatccaccagggccactgatgtcccagccaggttcagtggcagtgggtctgggacagacttcactctcaccatcagcagcctgcagtctgaagattttgcattttattattgtcaggagtataatgactggcctccccagctcactttcggccctgggaccaaggtggaaatcaaa

SEQ ID NO: 1434 - protein, 109 aa, Artificial Sequence
  Description of Artificial Sequence: Synthetic light chain variable region
ETTLTQSPATLSVSPGERVTLSCRASQDVSINLAWYQQKPGQAPRLLIYGASTRATDVPARFSGSGSGTDFTLTISSLQSEDFAFYYCQEYNDWPPQLTFGPGTKVEIK

SEQ ID NO: 1435 - protein, 11 aa, Artificial Sequence
  Description of Artificial Sequence: Synthetic light chain variable region CDR L1
RASQDVSINLA

SEQ ID NO: 1436 - DNA, 33 bp, Artificial Sequence
  Description of Artificial Sequence: Synthetic light chain variable region CDR L1
agggccagtcaggatgttagcatcaacttagcc

SEQ ID NO: 1437 - protein, 7 aa, Artificial Sequence
  Description of Artificial Sequence: Synthetic light chain variable region CDR L2
GASTRAT

SEQ ID NO: 1438 - DNA, 21 bp, Artificial Sequence
  Description of Artificial Sequence: Synthetic light chain variable region CDR L2
ggtgcatccaccagggccact

SEQ ID NO: 1439 - protein, 11 aa, Artificial Sequence
  Description of Artificial Sequence: Synthetic light chain variable region CDR L3
QEYNDWPPQLT

SEQ ID NO: 1440 - DNA, 33 bp, Artificial Sequence; identical to SEQ ID NO: 1408
  Description of Artificial Sequence: Synthetic light chain variable region CDR L3

SEQ ID NO: 1441 - DNA, 384 bp, Artificial Sequence
  Description of Artificial Sequence: Synthetic heavy chain variable region
caggtccagctggtgcagtctggggctgaggtgaagaagcctgggtcatcggtgaaggtctcctgcaaggcctcaggagtcattttgaccagcgttgctgtcagctgggtgcggcaggcccctggaaaaggctttgagtggatgggagggattcttcctggctttaataaagtcagacacgcccaggattttgagaacagagccactcacaccgcggacgcatctacgaacacagtctacatggagttgagcggactgaaatctgaggacacggccgtctattactgtgcgataatcgacccccaagattgtactcgtgccagttgcttttgggtcaactggctcgccccctggggccagggaaccctggtcaccgtctcctca

SEQ ID NO: 1442 - protein, 128 aa, Artificial Sequence
  Description of Artificial Sequence: Synthetic heavy chain variable region
QVQLVQSGAEVKKPGSSVKVSCKASGVILTSVAVSWVRQAPGKGFEWMGGILPGFNKVRHAQDFENRATHTADASTNTVYMELSGLKSEDTAVYYCAIIDPQDCTRASCFWVNWLAPWGQGTLVTVSS

SEQ ID NO: 1443 - protein, 9 aa, Artificial Sequence
  Description of Artificial Sequence: Synthetic heavy chain variable region CDR H1
VILTSVAVS

SEQ ID NO: 1444 - DNA, 27 bp, Artificial Sequence
  Description of Artificial Sequence: Synthetic heavy chain variable region CDR H1
gtcattttgaccagcgttgctgtcagc

SEQ ID NO: 1445 - protein, 17 aa, Artificial Sequence
  Description of Artificial Sequence: Synthetic heavy chain variable region CDR H2
GILPGFNKVRHAQDFEN

SEQ ID NO: 1446 - DNA, 51 bp, Artificial Sequence
  Description of Artificial Sequence: Synthetic heavy chain variable region CDR H2
gggattcttcctggctttaataaagtcagacacgcccaggattttgagaac

SEQ ID NO: 1447 - protein, 21 aa, Artificial Sequence
  Description of Artificial Sequence: Synthetic heavy chain variable region CDR H3
AIIDPQDCTRASCFWVNWLAP

SEQ ID NO: 1448 - DNA, 63 bp, Artificial Sequence; identical to SEQ ID NO: 1176
  Description of Artificial Sequence: Synthetic heavy chain variable region CDR H3

SEQ ID NO: 1449 - DNA, 324 bp, Artificial Sequence
  Description of Artificial Sequence: Synthetic light chain variable region
gaaacgacactcacgcagtctcccggcaccctgaccttgtctccaggggagagagccaccctgtcctgcagggccagtcagagtgttcctagcaggaacttagcctggtaccagcagaaacctggccaggctcccaggctcatcatctatgctgcatccaatagggccactgacatcccagacaggttcagtggcagtgggtctgggacagatttcactctcaccatcagcagactggagcctcaagattttgcagtgtattactgtcagcagtatgaaacctctccgatcaccttcggccaagggaccaaagtggatatcaaa

SEQ ID NO: 1450 - protein, 108 aa, Artificial Sequence
  Description of Artificial Sequence: Synthetic light chain variable region
ETTLTQSPGTLTLSPGERATLSCRASQSVPSRNLAWYQQKPGQAPRLIIYAASNRATDIPDRFSGSGSGTDFTLTISRLEPQDFAVYYCQQYETSPITFGQGTKVDIK

SEQ ID NO: 1451 - protein, 12 aa, Artificial Sequence
  Description of Artificial Sequence: Synthetic light chain variable region CDR L1
RASQSVPSRNLA

SEQ ID NO: 1452 - DNA, 36 bp, Artificial Sequence
  Description of Artificial Sequence: Synthetic light chain variable region CDR L1
agggccagtcagagtgttcctagcaggaacttagcc

SEQ ID NO: 1453 - protein, 7 aa, Artificial Sequence
  Description of Artificial Sequence: Synthetic light chain variable region CDR L2
AASNRAT

SEQ ID NO: 1454 - DNA, 21 bp, Artificial Sequence
  Description of Artificial Sequence: Synthetic light chain variable region CDR L2
gctgcatccaatagggccact

SEQ ID NO: 1455 - protein, 9 aa, Artificial Sequence
  Description of Artificial Sequence: Synthetic light chain variable region CDR L3
QQYETSPIT

SEQ ID NO: 1456 - DNA, 27 bp, Artificial Sequence
  Description of Artificial Sequence: Synthetic light chain variable region CDR L3
cagcagtatgaaacctctccgatcacc

SEQ ID NO: 1457 - DNA, 384 bp, Artificial Sequence
  Description of Artificial Sequence: Synthetic heavy chain variable region
gaggtgcagctggtggagtctgggggaggcttggtaaagcctggggggtccctaagactctcatgtgcagcctctggattcatcttccgcaacgcctggatgagctgggtccgccaggctccagggaaggggctggagtgggttggccggattaaaaggacaagtgaaggtgggtcagtcgactacgcgacacccgtgcaaggcagattctccatctcaagagatgattctagaaagacgctgtatctgcaaatgaacagcctggaaaccgacgacacagccgtgtattactgttccacaggcccaccctattcttactttgatagtagtggttattcggtcgtggactactggggcctgggaaccctggtcaccgtctcctca

SEQ ID NO: 1458 - protein, 128 aa, Artificial Sequence
  Description of Artificial Sequence: Synthetic heavy chain variable region
EVQLVESGGGLVKPGGSLRLSCAASGFIFRNAWMSWVRQAPGKGLEWVGRIKRTSEGGSVDYATPVQGRFSISRDDSRKTLYLQMNSLETDDTAVYYCSTGPPYSYFDSSGYSVVDYWGLGTLVTVSS

SEQ ID NO: 1459 - protein, 9 aa, Artificial Sequence
  Description of Artificial Sequence: Synthetic heavy chain variable region CDR H1
FIFRNAWMS

SEQ ID NO: 1460 - DNA, 27 bp, Artificial Sequence
  Description of Artificial Sequence: Synthetic heavy chain variable region CDR H1
ttcatcttccgcaacgcctggatgagc

SEQ ID NO: 1461 - protein, 19 aa, Artificial Sequence
  Description of Artificial Sequence: Synthetic heavy chain variable region CDR H2
RIKRTSEGGSVDYATPVQG

SEQ ID NO: 1462 - DNA, 57 bp, Artificial Sequence; identical to SEQ ID NO: 1318
  Description of Artificial Sequence: Synthetic heavy chain variable region CDR H2

SEQ ID NO: 1463 - protein, 19 aa, Artificial Sequence
  Description of Artificial Sequence: Synthetic heavy chain variable region CDR H3
STGPPYSYFDSSGYSVVDY

SEQ ID NO: 1464 - DNA, 57 bp, Artificial Sequence; identical to SEQ ID NO: 1416
  Description of Artificial Sequence: Synthetic heavy chain variable region CDR H3

SEQ ID NO: 1465 - DNA, 330 bp, Artificial Sequence
  Description of Artificial Sequence: Synthetic light chain variable region
tcctatgagctgactcagccaccctcagcgtctgggacccccgggcagagggtcaccatctcttgttctgcaagcagctccaacatcggagataattatttctactggtaccaacaactcccaggaaaggcccccacactcctcatgtatggtagtgatcaacggtcctcaggggtccctgaccgattctctggctcccagtctggcacctctgcctccctggccatcagtgggctccggtccgaggatgaagctgattattattgtgcagcttgggatgacagcctgagtggtccggtgttcggcggaggcacccagctgaccgtcctc

SEQ ID NO: 1466 - protein, 110 aa, Artificial Sequence
  Description of Artificial Sequence: Synthetic light chain variable region
SYELTQPPSASGTPGQRVTISCSASSSNIGDNYFYWYQQLPGKAPTLLMYGSDQRSSGVPDRFSGSQSGTSASLAISGLRSEDEADYYCAAWDDSLSGPVFGGGTQLTVL

SEQ ID NO: 1467 - protein, 13 aa, Artificial Sequence
  Description of Artificial Sequence: Synthetic light chain variable region CDR L1
SASSSNIGDNYFY

SEQ ID NO: 1468 - DNA, 39 bp, Artificial Sequence; identical to SEQ ID NO: 204
  Description of Artificial Sequence: Synthetic light chain variable region CDR L1

SEQ ID NO: 1469 - protein, 7 aa, Artificial Sequence
  Description of Artificial Sequence: Synthetic light chain variable region CDR L2
GSDQRSS

SEQ ID NO: 1470 - DNA, 21 bp, Artificial Sequence
  Description of Artificial Sequence: Synthetic light chain variable region CDR L2
ggtagtgatcaacggtcctca

SEQ ID NO: 1471 - protein, 11 aa, Artificial Sequence
  Description of Artificial Sequence: Synthetic light chain variable region CDR L3
AAWDDSLSGPV

SEQ ID NO: 1472 - DNA, 33 bp, Artificial Sequence; identical to SEQ ID NO: 208
  Description of Artificial Sequence: Synthetic light chain variable region CDR L3

SEQ ID NO: 1473 - DNA, 387 bp, Artificial Sequence
  Description of Artificial Sequence: Synthetic heavy chain variable region
caggtccagctggtgcagtctggggctgaggtgaagaagcctgggtcctcggtgataatctcctgcaaggcatctggaggcaccttcagaaactacggtttcacctgggtgcgacaggcccctggacaagggcttgagtggttgggagggatcatccctatgtttgagacagtcagatatgcacagaagttccagggaagagtcacaatcaccgcggacgaaaacaccaacacagccttcctggcggtgagcagcctgcgatctgaagacacgggcgtctatttttgtgcgcgagacctccagacggggattatgagcagcgtgaggtcggaatataggggctttatggacccctggggccagggaaccctggtcaccgtctcctca

SEQ ID NO: 1474 - protein, 129 aa, Artificial Sequence
  Description of Artificial Sequence: Synthetic heavy chain variable region
QVQLVQSGAEVKKPGSSVIISCKASGGTFRNYGFTWVRQAPGQGLEWLGGIIPMFETVRYAQKFQGRVTITADENTNTAFLAVSSLRSEDTGVYFCARDLQTGIMSSVRSEYRGFMDPWGQGTLVTVSS

SEQ ID NO: 1475 - protein, 9 aa, Artificial Sequence
  Description of Artificial Sequence: Synthetic heavy chain variable region CDR H1
GTFRNYGFT

SEQ ID NO: 1476 - DNA, 27 bp, Artificial Sequence
  Description of Artificial Sequence: Synthetic heavy chain variable region CDR H1
ggcaccttcagaaactacggtttcacc

SEQ ID NO: 1477 - protein, 17 aa, Artificial Sequence
  Description of Artificial Sequence: Synthetic heavy chain variable region CDR H2
GIIPMFETVRYAQKFQG

SEQ ID NO: 1478 - DNA, 51 bp, Artificial Sequence
  Description of Artificial Sequence: Synthetic heavy chain variable region CDR H2
gggatcatccctatgtttgagacagtcagatatgcacagaagttccaggga

SEQ ID NO: 1479 - protein, 22 aa, Artificial Sequence
  Description of Artificial Sequence: Synthetic heavy chain variable region CDR H3
ARDLQTGIMSSVRSEYRGFMDP

SEQ ID NO: 1480 - DNA, 66 bp, Artificial Sequence
  Description of Artificial Sequence: Synthetic heavy chain variable region CDR H3
gcgcgagacctccagacggggattatgagcagcgtgaggtcggaatataggggctttatggacccc

SEQ ID NO: 1481 - DNA, 330 bp, Artificial Sequence
  Description of Artificial Sequence: Synthetic light chain variable region
cagtctgtgctgacgcagccgccctcggtgtctggagccccccggcagagggtcaccatctcctgttctggaagcagctccaacatcggaactaatgctgtaaactggtaccaacagctcccaggaaagtctcccaaagtcctcatctactatgatgagctggtgccctcaggggtctctgaccgattctctggctccaggtctggcacctcagcctccctggccataagtggactccggtctgaggatgaggcttactattactgtgcagcttgggatgacagtctgaatggttgggtgttcggcggaggcacccagctcaccgtccta

SEQ ID NO: 1482 - protein, 110 aa, Artificial Sequence
  Description of Artificial Sequence: Synthetic light chain variable region
QSVLTQPPSVSGAPRQRVTISCSGSSSNIGTNAVNWYQQLPGKSPKVLIYYDELVPSGVSDRFSGSRSGTSASLAISGLRSEDEAYYYCAAWDDSLNGWVFGGGTQLTVL

SEQ ID NO: 1483 - protein, 13 aa, Artificial Sequence
  Description of Artificial Sequence: Synthetic light chain variable region CDR L1
SGSSSNIGTNAVN

SEQ ID NO: 1484 - DNA, 39 bp, Artificial Sequence
  Description of Artificial Sequence: Synthetic light chain variable region CDR L1
tctggaagcagctccaacatcggaactaatgctgtaaac

SEQ ID NO: 1485 - protein, 7 aa, Artificial Sequence
  Description of Artificial Sequence: Synthetic light chain variable region CDR L2
YDELVPS

SEQ ID NO: 1486 - DNA, 21 bp, Artificial Sequence
  Description of Artificial Sequence: Synthetic light chain variable region CDR L2
tatgatgagctggtgccctca

SEQ ID NO: 1487 - protein, 11 aa, Artificial Sequence
  Description of Artificial Sequence: Synthetic light chain variable region CDR L3
AAWDDSLNGWV

SEQ ID NO: 1488 - DNA, 33 bp, Artificial Sequence
  Description of Artificial Sequence: Synthetic light chain variable region CDR L3
gcagcttgggatgacagtctgaatggttgggtg

SEQ ID NO: 1489 - DNA, 366 bp, Artificial Sequence
  Description of Artificial Sequence: Synthetic heavy chain variable region
gaggtgcagctggtggagtcggggggaggcgtggtccagcctgggaggtccctgagactctcctgtgcagtctctggattcacgttcagtaactttgggatgcactgggtccgccaggctccaggcaaggggctggagtgggtggcagctatttcatacgatggaagaaaaagattccaggcagactccgtgaagggccgattcaccatctccagagacaacttgaagaacacgctgaatctccaaatgaacagcctgaaaactgaggacacggctgtgtattactgtgcgaaatcgtctagacttttggactggttatacaatatggacttctggggccaagggaccacggtcaccgtctcctca

SEQ ID NO: 1490 - protein, 122 aa, Artificial Sequence
  Description of Artificial Sequence: Synthetic heavy chain variable region
EVQLVESGGGVVQPGRSLRLSCAVSGFTFSNFGMHWVRQAPGKGLEWVAAISYDGRKRFQADSVKGRFTISRDNLKNTLNLQMNSLKTEDTAVYYCAKSSRLLDWLYNMDFWGQGTTVTVSS

SEQ ID NO: 1491 - protein, 9 aa, Artificial Sequence
  Description of Artificial Sequence: Synthetic heavy chain variable region CDR H1
FTFSNFGMH

SEQ ID NO: 1492 - DNA, 27 bp, Artificial Sequence
  Description of Artificial Sequence: Synthetic heavy chain variable region CDR H1
ttcacgttcagtaactttgggatgcac

SEQ ID NO: 1493 - protein, 17 aa, Artificial Sequence
  Description of Artificial Sequence: Synthetic heavy chain variable region CDR H2
AISYDGRKRFQADSVKG

SEQ ID NO: 1494 - DNA, 51 bp, Artificial Sequence
  Description of Artificial Sequence: Synthetic heavy chain variable region CDR H2
gctatttcatacgatggaagaaaaagattccaggcagactccgtgaagggc

SEQ ID NO: 1495 - protein, 15 aa, Artificial Sequence
  Description of Artificial Sequence: Synthetic heavy chain variable region CDR H3
AKSSRLLDWLYNMDF

SEQ ID NO: 1496 - DNA, 45 bp, Artificial Sequence
  Description of Artificial Sequence: Synthetic heavy chain variable region CDR H3
gcgaaatcgtctagacttttggactggttatacaatatggacttc

SEQ ID NO: 1497 - DNA, 324 bp, Artificial Sequence
  Description of Artificial Sequence: Synthetic light chain variable region
tcctatgtgctgactcagccaccctcagtgtcagtggccccaggaaagacggccaggattacctgtgggggaaacatccttgggagttcaagtgtccactggttccagcagaaggcaggccaggcccctgtcctggtcatctattatgatagcgaccggccctcagggatccctgagcgattctctggctcccattctggggacacggccaccctgaccatcagcagggtcgaagtcggggatgaggccgactattactgtcaggtgtgggataatagtaattcccagggggtcttcggcggaggcacccagctgaccgtcctc

SEQ ID NO: 1498 - protein, 108 aa, Artificial Sequence
  Description of Artificial Sequence: Synthetic light chain variable region
SYVLTQPPSVSVAPGKTARITCGGNILGSSSVHWFQQKAGQAPVLVIYYDSDRPSGIPERFSGSHSGDTATLTISRVEVGDEADYYCQVWDNSNSQGVFGGGTQLTVL

SEQ ID NO: 1499 - protein, 11 aa, Artificial Sequence
  Description of Artificial Sequence: Synthetic light chain variable region CDR L1
GGNILGSSSVH

SEQ ID NO: 1500 - DNA, 33 bp, Artificial Sequence
  Description of Artificial Sequence: Synthetic light chain variable region CDR L1
gggggaaacatccttgggagttcaagtgtccac

SEQ ID NO: 1501 - protein, 7 aa, Artificial Sequence
  Description of Artificial Sequence: Synthetic light chain variable region CDR L2
YDSDRPS

SEQ ID NO: 1502 - DNA, 21 bp, Artificial Sequence
  Description of Artificial Sequence: Synthetic light chain variable region CDR L2
tatgatagcgaccggccctca

SEQ ID NO: 1503 - protein, 11 aa, Artificial Sequence
  Description of Artificial Sequence: Synthetic light chain variable region CDR L3
QVWDNSNSQGV

SEQ ID NO: 1504 - DNA, 33 bp, Artificial Sequence
  Description of Artificial Sequence: Synthetic light chain variable region CDR L3
caggtgtgggataatagtaattcccagggggtc

SEQ ID NO: 1505 - DNA, 369 bp, Artificial Sequence
  Description of Artificial Sequence: Synthetic heavy chain variable region
caggtgcagctacagcagtggggcccaggactggtgaagccgtcacagaccctgtccctcacctgcagtgtctctggtgcctcagtcaaaataggttctaatttctggacgtggatccgccagcgcccagggaagggcctggagtggattggggccatccatgacactggcaccacctactacaacccgtcccttgagcctcaagtaatcatttcaactgacacgtctcagaaccaattctccctgaggctgacctctgtgactgccgcggacacggccgtttactactgtgcgagggggcgtggatacacctatggatggcgttactttgactactggggccagggaaccctggtcaccgtctcctca

SEQ ID NO: 1506 - protein, 123 aa, Artificial Sequence
  Description of Artificial Sequence: Synthetic heavy chain variable region
QVQLQQWGPGLVKPSQTLSLTCSVSGASVKIGSNFWTWIRQRPGKGLEWIGAIHDTGTTYYNPSLEPQVIISTDTSQNQFSLRLTSVTAADTAVYYCARGRGYTYGWRYFDYWGQGTLVTVSS

SEQ ID NO: 1507 - protein, 11 aa, Artificial Sequence
  Description of Artificial Sequence: Synthetic heavy chain variable region CDR H1
ASVKIGSNFWT

SEQ ID NO: 1508 - DNA, 33 bp, Artificial Sequence
  Description of Artificial Sequence: Synthetic heavy chain variable region CDR H1
gcctcagtcaaaataggttctaatttctggacg

SEQ ID NO: 1509 - protein, 16 aa, Artificial Sequence
  Description of Artificial Sequence: Synthetic heavy chain variable region CDR H2
AIHDTGTTYYNPSLEP

SEQ ID NO: 1510 - DNA, 48 bp, Artificial Sequence
  Description of Artificial Sequence: Synthetic heavy chain variable region CDR H2
gccatccatgacactggcaccacctactacaacccgtcccttgagcct

SEQ ID NO: 1511 - protein, 15 aa, Artificial Sequence
  Description of Artificial Sequence: Synthetic heavy chain variable region CDR H3
ARGRGYTYGWRYFDY

SEQ ID NO: 1512 - DNA, 45 bp, Artificial Sequence
  Description of Artificial Sequence: Synthetic heavy chain variable region CDR H3
gcgagggggcgtggatacacctatggatggcgttactttgactac

SEQ ID NO: 1513 - DNA, 324 bp, Artificial Sequence
  Description of Artificial Sequence: Synthetic light chain variable region
tcctatgtgctgactcagccaccctcggtgtcagtgtccccaggacagacggccaggatcacctgctctggagatgcattgccaaagcaatatgccttttggtatcagcacaaggcaggacaggcccctgtgttggtcataaaaaaagacactgagaggccctcagggatccctgagcgattctctggctccatctcagggacaacagccactttgatcatcagtggagtccaggcagaagacgaggctgactattactgtcaatcttcagacagtagtggtaatgttgtcttattcggcggaggcacccagctgaccgtcctc

SEQ ID NO: 1514 - protein, 108 aa, Artificial Sequence
  Description of Artificial Sequence: Synthetic light chain variable region
SYVLTQPPSVSVSPGQTARITCSGDALPKQYAFWYQHKAGQAPVLVIKKDTERPSGIPERFSGSISGTTATLIISGVQAEDEADYYCQSSDSSGNVVLFGGGTQLTVL

SEQ ID NO: 1515 - protein, 11 aa, Artificial Sequence
  Description of Artificial Sequence: Synthetic light chain variable region CDR L1
SGDALPKQYAF

SEQ ID NO: 1516 - DNA, 33 bp, Artificial Sequence
  Description of Artificial Sequence: Synthetic light chain variable region CDR L1
tctggagatgcattgccaaagcaatatgccttt

SEQ ID NO: 1517 - protein, 7 aa, Artificial Sequence
  Description of Artificial Sequence: Synthetic light chain variable region CDR L2
KDTERPS

SEQ ID NO: 1518 - DNA, 21 bp, Artificial Sequence
  Description of Artificial Sequence: Synthetic light chain variable region CDR L2
aaagacactgagaggccctca

SEQ ID NO: 1519 - protein, 11 aa, Artificial Sequence
  Description of Artificial Sequence: Synthetic light chain variable region CDR L3
QSSDSSGNVVL

SEQ ID NO: 1520 - DNA, 33 bp, Artificial Sequence
  Description of Artificial Sequence: Synthetic light chain variable region CDR L3
caatcttcagacagtagtggtaatgttgtctta

SEQ ID NO: 1521 - DNA, 372 bp, Artificial Sequence
  Description of Artificial Sequence: Synthetic heavy chain variable region
caggtgcagctggtgcaatctgggggaggcgtggtccagcctgggaggtccctgagactctcctgtgcagcgtctggattcagcttcagtagttatggcatgcactgggtccgccaggctccaggcaaggggctggagtgggtggcagctatattttatcatgaaattaaggactattatgcagactccgtgaacggccgattcagcatctccagagacaattccaagaacaccctgtatctggaaatgtacagcctgaaggtcgaggacacggctgtgtattattgtgcgagagatagtgggaccctcacaggactcccgcatgatgcctttgatatctggggccaagggaccacggtcaccgtctcctca

SEQ ID NO: 1522 - protein, 124 aa, Artificial Sequence
  Description of Artificial Sequence: Synthetic heavy chain variable region
QVQLVQSGGGVVQPGRSLRLSCAASGFSFSSYGMHWVRQAPGKGLEWVAAIFYHEIKDYYADSVNGRFSISRDNSKNTLYLEMYSLKVEDTAVYYCARDSGTLTGLPHDAFDIWGQGTTVTVSS

SEQ ID NO: 1523 - protein, 9 aa, Artificial Sequence
  Description of Artificial Sequence: Synthetic heavy chain variable region CDR H1
FSFSSYGMH

SEQ ID NO: 1524 - DNA, 27 bp, Artificial Sequence
  Description of Artificial Sequence: Synthetic heavy chain variable region CDR H1
ttcagcttcagtagttatggcatgcac

SEQ ID NO: 1525 - protein, 17 aa, Artificial Sequence
  Description of Artificial Sequence: Synthetic heavy chain variable region CDR H2
AIFYHEIKDYYADSVNG

SEQ ID NO: 1526 - DNA, 51 bp, Artificial Sequence
  Description of Artificial Sequence: Synthetic heavy chain variable region CDR H2
gctatattttatcatgaaattaaggactattatgcagactccgtgaacggc

SEQ ID NO: 1527 - protein, 17 aa, Artificial Sequence
  Description of Artificial Sequence: Synthetic heavy chain variable region CDR H3
ARDSGTLTGLPHDAFDI

SEQ ID NO: 1528 - DNA, 51 bp, Artificial Sequence
  Description of Artificial Sequence: Synthetic heavy chain variable region CDR H3
gcgagagatagtgggaccctcacaggactcccgcatgatgcctttgatatc

SEQ ID NO: 1529 - DNA, 321 bp, Artificial Sequence
  Description of Artificial Sequence: Synthetic light chain variable region
gacatccagatgacccagtctccttccaccctgagtgcatctttaggaggcagagtcaccatcacttgccgggccagtcagagtgttactaacaggttggcctggtatcaacacaaaccagggaaagcccctaacctcctgatctataaggcgtctactttagaaatcggggtcccatcaaggttcagcggcagtggatctgggacagagttcactctcaccatcagcagcctgcagcctgatgattttgcgacttattactgccaacagtatagtagttattcgtggacgttcggccaagggaccaaggtggaaatcaaa

SEQ ID NO: 1530 - protein, 107 aa, Artificial Sequence
  Description of Artificial Sequence: Synthetic light chain variable region
DIQMTQSPSTLSASLGGRVTITCRASQSVTNRLAWYQHKPGKAPNLLIYKASTLEIGVPSRFSGSGSGTEFTLTISSLQPDDFATYYCQQYSSYSWTFGQGTKVEIK

SEQ ID NO: 1531 - protein, 11 aa, Artificial Sequence
  Description of Artificial Sequence: Synthetic light chain variable region CDR L1
RASQSVTNRLA

SEQ ID NO: 1532 - DNA, 33 bp, Artificial Sequence
  Description of Artificial Sequence: Synthetic light chain variable region CDR L1
cgggccagtcagagtgttactaacaggttggcc

SEQ ID NO: 1533 - protein, 7 aa, Artificial Sequence
  Description of Artificial Sequence: Synthetic light chain variable region CDR L2
KASTLEI

SEQ ID NO: 1534 - DNA, 21 bp, Artificial Sequence
  Description of Artificial Sequence: Synthetic light chain variable region CDR L2
aaggcgtctactttagaaatc

SEQ ID NO: 1535 - protein, 9 aa, Artificial Sequence
  Description of Artificial Sequence: Synthetic light chain variable region CDR L3
QQYSSYSWT

SEQ ID NO: 1536 - DNA, 27 bp, Artificial Sequence
  Description of Artificial Sequence: Synthetic light chain variable region CDR L3
caacagtatagtagttattcgtggacg

SEQ ID NO: 1537 - DNA, 384 bp, Artificial Sequence; identical to SEQ ID NO: 1457
  Description of Artificial Sequence: Synthetic heavy chain variable region

SEQ ID NO: 1538 - protein, 128 aa, Artificial Sequence; identical to SEQ ID NO: 1458
  Description of Artificial Sequence: Synthetic heavy chain variable region

SEQ ID NO: 1539 - protein, 9 aa, Artificial Sequence
  Description of Artificial Sequence: Synthetic heavy chain variable region CDR H1
FIFRNAWMS

SEQ ID NO: 1540 - DNA, 27 bp, Artificial Sequence
  Description of Artificial Sequence: Synthetic heavy chain variable region CDR H1
ttcatcttccgcaacgcctggatgagc

SEQ ID NO: 1541 - protein, 19 aa, Artificial Sequence
  Description of Artificial Sequence: Synthetic heavy chain variable region CDR H2
RIKRTSEGGSVDYATPVQG

SEQ ID NO: 1542 - DNA, 57 bp, Artificial Sequence; identical to SEQ ID NO: 1318
  Description of Artificial Sequence: Synthetic heavy chain variable region CDR H2

SEQ ID NO: 1543 - protein, 19 aa, Artificial Sequence
  Description of Artificial Sequence: Synthetic heavy chain variable region CDR H3
STGPPYSYFDSSGYSVVDY

SEQ ID NO: 1544 - DNA, 57 bp, Artificial Sequence; identical to SEQ ID NO: 1416
  Description of Artificial Sequence: Synthetic heavy chain variable region CDR H3

SEQ ID NO: 1545 - DNA, 330 bp, Artificial Sequence
  Description of Artificial Sequence: Synthetic light chain variable region
cagccagtgctgactcagcccccctcagcgtctgggacccccgggcagagggtcaccatctcttgttctgcaagcagctccaacatcggagataattatttctactggtaccaacaactcccaggaaaggcccccacactcctcatgtatggtagtgatcaacggtcctcaggggtccctgaccgattctctggctcccagtctggcacctctgcctccctggccatcagtgggctccggtccgaggatgaagctgattattattgtgcagcttgggatgacagcctgagtggtccggtgttcggcggagggaccaagctcaccgtccta

SEQ ID NO: 1546 - protein, 110 aa, Artificial Sequence
  Description of Artificial Sequence: Synthetic light chain variable region
QPVLTQPPSASGTPGQRVTISCSASSSNIGDNYFYWYQQLPGKAPTLLMYGSDQRSSGVPDRFSGSQSGTSASLAISGLRSEDEADYYCAAWDDSLSGPVFGGGTKLTVL

SEQ ID NO: 1547 - protein, 13 aa, Artificial Sequence
  Description of Artificial Sequence: Synthetic light chain variable region CDR L1
SASSSNIGDNYFY

SEQ ID NO: 1548 - DNA, 39 bp, Artificial Sequence; identical to SEQ ID NO: 204
  Description of Artificial Sequence: Synthetic light chain variable region CDR L1

SEQ ID NO: 1549 - protein, 7 aa, Artificial Sequence
  Description of Artificial Sequence: Synthetic light chain variable region CDR L2
GSDQRSS

SEQ ID NO: 1550 - DNA, 21 bp, Artificial Sequence
  Description of Artificial Sequence: Synthetic light chain variable region CDR L2
ggtagtgatcaacggtcctca

SEQ ID NO: 1551 - protein, 11 aa, Artificial Sequence
  Description of Artificial Sequence: Synthetic light chain variable region CDR L3
AAWDDSLSGPV

SEQ ID NO: 1552 - DNA, 33 bp, Artificial Sequence; identical to SEQ ID NO: 208
  Description of Artificial Sequence: Synthetic light chain variable region CDR L3

SEQ ID NO: 1553 - DNA, 366 bp, Artificial Sequence
  Description of Artificial Sequence: Synthetic heavy chain variable region
gaggtgcagctggtggagtcggggggaggcgtggtccagcctgggaggtccctgagactctcctgtgcagtctctggattcacattcagtaactttgggatgcactgggtccgccaggctccaggcaaggggctggagtgggtggcagctatttcatacgatggaagaaaaacattccaggcagactccgtgaagggccgattcatcatctccagagacaacttgaagaacacgttgaatctccaaatgaacagcctgaaaactgaggacacggctgtgtattactgtgcgaaatcgtctagatttttggactggttatacaatatggacttctggggccaagggaccacggtcaccgtctcctca

SEQ ID NO: 1554 - protein, 122 aa, Artificial Sequence
  Description of Artificial Sequence: Synthetic heavy chain variable region
EVQLVESGGGVVQPGRSLRLSCAVSGFTFSNFGMHWVRQAPGKGLEWVAAISYDGRKTFQADSVKGRFIISRDNLKNTLNLQMNSLKTEDTAVYYCAKSSRFLDWLYNMDFWGQGTTVTVSS

SEQ ID NO: 1555 - protein, 9 aa, Artificial Sequence
  Description of Artificial Sequence: Synthetic heavy chain variable region CDR H1
FTFSNFGMH

SEQ ID NO: 1556 - DNA, 27 bp, Artificial Sequence
  Description of Artificial Sequence: Synthetic heavy chain variable region CDR H1
ttcacattcagtaactttgggatgcac

SEQ ID NO: 1557 - protein, 17 aa, Artificial Sequence
  Description of Artificial Sequence: Synthetic heavy chain variable region CDR H2
AISYDGRKTFQADSVKG

SEQ ID NO: 1558 - DNA, 51 bp, Artificial Sequence
  Description of Artificial Sequence: Synthetic heavy chain variable region CDR H2
gctatttcatacgatggaagaaaaacattccaggcagactccgtgaagggc

SEQ ID NO: 1559 - protein, 15 aa, Artificial Sequence
  Description of Artificial Sequence: Synthetic heavy chain variable region CDR H3
AKSSRFLDWLYNMDF

SEQ ID NO: 1560 - DNA, 45 bp, Artificial Sequence
  Description of Artificial Sequence: Synthetic heavy chain variable region CDR H3
gcgaaatcgtctagatttttggactggttatacaatatggacttc

SEQ ID NO: 1561 - DNA, 324 bp, Artificial Sequence
  Description of Artificial Sequence: Synthetic light chain variable region
tcctatgagctgacacagccaccctcagtgtcagaggccccaggaaagacggccacgattacctgtgggggaatcatccttgggacttcaagtgtccactggttccagcagaagtcaggccaggcccctgtcctggtcatctattatgatagcgaccggccctcagggatccctgagcgattctctggctcccattctggggacacggccaccctgaccatcagcagggtcgaagtcggggatgaggccgactattactgtcaggtgtgggataatagtcattcccagggggtcttcggcggaggcacccagctgaccgtcctc

SEQ ID NO: 1562 - protein, 108 aa, Artificial Sequence
  Description of Artificial Sequence: Synthetic light chain variable region
SYELTQPPSVSEAPGKTATITCGGIILGTSSVHWFQQKSGQAPVLVIYYDSDRPSGIPERFSGSHSGDTATLTISRVEVGDEADYYCQVWDNSHSQGVFGGGTQLTVL

SEQ ID NO: 1563 - protein, 11 aa, Artificial Sequence
  Description of Artificial Sequence: Synthetic light chain variable region CDR L1
GGIILGTSSVH

SEQ ID NO: 1564 - DNA, 33 bp, Artificial Sequence
  Description of Artificial Sequence: Synthetic light chain variable region CDR L1
gggggaatcatccttgggacttcaagtgtccac

SEQ ID NO: 1565 - protein, 7 aa, Artificial Sequence
  Description of Artificial Sequence: Synthetic light chain variable region CDR L2
YDSDRPS

SEQ ID NO: 1566 - DNA, 21 bp, Artificial Sequence
  Description of Artificial Sequence: Synthetic light chain variable region CDR L2
tatgatagcgaccggccctca

SEQ ID NO: 1567 - protein, 11 aa, Artificial Sequence
  Description of Artificial Sequence: Synthetic light chain variable region CDR L3
QVWDNSHSQGV

SEQ ID NO: 1568 - DNA, 33 bp, Artificial Sequence
  Description of Artificial Sequence: Synthetic light chain variable region CDR L3
caggtgtgggataatagtcattcccagggggtc

SEQ ID NO: 1569 - DNA, 372 bp, Artificial Sequence
  Description of Artificial Sequence: Synthetic heavy chain variable region
caggtgcagctggtggagtctgggggaggcgtggtccagcctgggaggtccctgagactctcctgtgcagcgtctggattcgccttccgtgtctatgacatccactgggtccgccaggctccaggcaaggggctggagtgggtggcagttgcctggtctgatggacgtgatgaattctatgcagactccgtgaagggccgaatcaccatctccagagacaattcaaagaacactgtatatctgcagatgagcagcctgagagtcgcggatacggctgtgtattactgtgcgagagatagtgggaccctaacagggctccctcatgatgcttttgatgtctggggccaggggaccacggtcaccgtctcctca

SEQ ID NO: 1570 - protein, 124 aa, Artificial Sequence
  Description of Artificial Sequence: Synthetic heavy chain variable region
QVQLVESGGGVVQPGRSLRLSCAASGFAFRVYDIHWVRQAPGKGLEWVAVAWSDGRDEFYADSVKGRITISRDNSKNTVYLQMSSLRVADTAVYYCARDSGTLTGLPHDAFDVWGQGTTVTVSS

SEQ ID NO: 1571 - protein, 9 aa, Artificial Sequence
  Description of Artificial Sequence: Synthetic heavy chain variable region CDR H1
FAFRVYDIH

SEQ ID NO: 1572 - DNA, 27 bp, Artificial Sequence
  Description of Artificial Sequence: Synthetic heavy chain variable region CDR H1
ttcgccttccgtgtctatgacatccac

SEQ ID NO: 1573 - protein, 17 aa, Artificial Sequence
  Description of Artificial Sequence: Synthetic heavy chain variable region CDR H2
VAWSDGRDEFYADSVKG

SEQ ID NO: 1574 - DNA, 51 bp, Artificial Sequence
  Description of Artificial Sequence: Synthetic heavy chain variable region CDR H2
gttgcctggtctgatggacgtgatgaattctatgcagactccgtgaagggc

SEQ ID NO: 1575 - protein, 17 aa, Artificial Sequence
  Description of Artificial Sequence: Synthetic heavy chain variable region CDR H3
ARDSGTLTGLPHDAFDV

SEQ ID NO: 1576 - DNA, 51 bp, Artificial Sequence
  Description of Artificial Sequence: Synthetic heavy chain variable region CDR H3
gcgagagatagtgggaccctaacagggctccctcatgatgcttttgatgtc

SEQ ID NO: 1577 - DNA, 321 bp, Artificial Sequence
  Description of Artificial Sequence: Synthetic light chain variable region
gacatccagttgacccagtctccttccaccctgtctgcatctgtaggagacagagtcaccatcacttgccgggccagtcagagtattaccaccaggttggcctggtatcagcagaaattagggaaagcccctaagctcctggtctataaggcgtcaactttagaaattggggtcccctcaaggttcagcggcaggggatctgggacagaattcactctcaccatcagcagcctgcagcctgatgattttgcaacttattactgccatcactacaatagttattcgtggacgttcggccaagggaccaaagtggatatcaaa

SEQ ID NO: 1578 - protein, 107 aa, Artificial Sequence
  Description of Artificial Sequence: Synthetic light chain variable region
DIQLTQSPSTLSASVGDRVTITCRASQSITTRLAWYQQKLGKAPKLLVYKASTLEIGVPSRFSGRGSGTEFTLTISSLQPDDFATYYCHHYNSYSWTFGQGTKVDIK

SEQ ID NO: 1579 - protein, 11 aa, Artificial Sequence
  Description of Artificial Sequence: Synthetic light chain variable region CDR L1
RASQSITTRLA

SEQ ID NO: 1580 - DNA, 33 bp, Artificial Sequence
  Description of Artificial Sequence: Synthetic light chain variable region CDR L1
cgggccagtcagagtattaccaccaggttggcc

SEQ ID NO: 1581 - protein, 7 aa, Artificial Sequence
  Description of Artificial Sequence: Synthetic light chain variable region CDR L2
KASTLEI

SEQ ID NO: 1582 - DNA, 21 bp, Artificial Sequence
  Description of Artificial Sequence: Synthetic light chain variable region CDR L2
aaggcgtcaactttagaaatt

SEQ ID NO: 1583 - protein, 9 aa, Artificial Sequence
  Description of Artificial Sequence: Synthetic light chain variable region CDR L3
HHYNSYSWT

SEQ ID NO: 1584 - DNA, 27 bp, Artificial Sequence
  Description of Artificial Sequence: Synthetic light chain variable region CDR L3
catcactacaatagttattcgtggacg

SEQ ID NO: 1585 - DNA, 372 bp, Artificial Sequence
  Description of Artificial Sequence: Synthetic heavy chain variable region
caggtgcagctggtggagtctgggggaggcgtggtccagcctgggaggtccctgagactctcctgtgctgcctctggattcactttcactgactatgctatgcactgggtccgccaggctccaggcaagggactacagtgggtggcacttatatcatataacggacgtatacaatattacgcagactccgtgaagggccgattcaccatctccagagacgattccaagaacacgctgtatctgcagatgaacagcctgagagctggggacacggctgtctattactgtgcgagagatggggatcttgtggctgtcccagctgctatcggcttcgactcctggggccagggaaccctggtcaccgtctcctca

SEQ ID NO: 1586 - protein, 124 aa, Artificial Sequence
  Description of Artificial Sequence: Synthetic heavy chain variable region
QVQLVESGGGVVQPGRSLRLSCAASGFTFTDYAMHWVRQAPGKGLQWVALISYNGRIQYYADSVKGRFTISRDDSKNTLYLQMNSLRAGDTAVYYCARDGDLVAVPAAIGFDSWGQGTLVTVSS

SEQ ID NO: 1587 - protein, 9 aa, Artificial Sequence
  Description of Artificial Sequence: Synthetic heavy chain variable region CDR H1
FTFTDYAMH

SEQ ID NO: 1588 - DNA, 27 bp, Artificial Sequence
  Description of Artificial Sequence: Synthetic heavy chain variable region CDR H1
ttcactttcactgactatgctatgcac

SEQ ID NO: 1589 - protein, 17 aa, Artificial Sequence
  Description of Artificial Sequence: Synthetic heavy chain variable region CDR H2
LISYNGRIQYYADSVKG

SEQ ID NO: 1590 - DNA, 51 bp, Artificial Sequence
  Description of Artificial Sequence: Synthetic heavy chain variable region CDR H2
cttatatcatataacggacgtatacaatattacgcagactccgtgaagggc

SEQ ID NO: 1591 - protein, 17 aa, Artificial Sequence
  Description of Artificial Sequence: Synthetic heavy chain variable region CDR H3
ARDGDLVAVPAAIGFDS

SEQ ID NO: 1592 - DNA, 51 bp, Artificial Sequence
  Description of Artificial Sequence: Synthetic heavy chain variable region CDR H3
gcgagagatggggatcttgtggctgtcccagctgctatcggcttcgactcc

SEQ ID NO: 1593 - DNA, 339 bp, Artificial Sequence
  Description of Artificial Sequence: Synthetic light chain variable region
gacatccaggtgacccagtctccagactccctggctgtgtctctgggcgagagggccaccatcaactgcaagtccagccagagtgttttatacacctccaacaacaagaactacttagcttggtaccagcagaaatcgagacagcctcctaagctgctcatttactgggcatctacccgggaatccggggtccctgagcgattcagtggcagcgggtctgggacagatttcactctcaccatcagcagcctgcaggctgaagatgtggcagtttattactgtcagcaatattctagtcctccgtacacttttggccaggggaccaaggtggagattaaa

SEQ ID NO: 1594 - protein, 113 aa, Artificial Sequence
  Description of Artificial Sequence: Synthetic light chain variable region
DIQVTQSPDSLAVSLGERATINCKSSQSVLYTSNNKNYLAWYQQKSRQPPKLLIYWASTRESGVPERFSGSGSGTDFTLTISSLQAEDVAVYYCQQYSSPPYTFGQGTKVEIK

SEQ ID NO: 1595 - protein, 17 aa, Artificial Sequence
  Description of Artificial Sequence: Synthetic light chain variable region CDR L1
KSSQSVLYTSNNKNYLA

SEQ ID NO: 1596 - DNA, 51 bp, Artificial Sequence
  Description of Artificial Sequence: Synthetic light chain variable region CDR L1
aagtccagccagagtgttttatacacctccaacaacaagaactacttagct

SEQ ID NO: 1597 - protein, 7 aa, Artificial Sequence
  Description of Artificial Sequence: Synthetic light chain variable region CDR L2
WASTRES

SEQ ID NO: 1598 - DNA, 21 bp, Artificial Sequence
  Description of Artificial Sequence: Synthetic light chain variable region CDR L2
tgggcatctacccgggaatcc

SEQ ID NO: 1599 - protein, 9 aa, Artificial Sequence
  Description of Artificial Sequence: Synthetic light chain variable region CDR L3
QQYSSPPYT

SEQ ID NO: 1600 - DNA, 27 bp, Artificial Sequence
  Description of Artificial Sequence: Synthetic light chain variable region CDR L3
cagcaatattctagtcctccgtacact

SEQ ID NO: 1601 - DNA, 366 bp, Artificial Sequence
  Description of Artificial Sequence: Synthetic heavy chain variable region
gaggtgcagctggtggagtctgggggaggcctggtcaggccgggggggtccctgagactctcctgcgcagcgtctggattcgccttcagtagctatagtttacactgggtccgccaggctccagggaggggactggagtgggtcgcatcgatcagtgcaggtagcagtttcacagattacgcggcctcagtgaggggccgattcactatctccagaaacatcgccaactcactgtatctgcaaatgaacaggctgagagccgaggacacggctgtctattactgtgcgagagttatcggagacgggacgattcttggagtggtttttgactactggggcccgggaaccctggtcaccgtctcctca

SEQ ID NO: 1602 - protein, 122 aa, Artificial Sequence
  Description of Artificial Sequence: Synthetic heavy chain variable region
EVQLVESGGGLVRPGGSLRLSCAASGFAFSSYSLHWVRQAPGRGLEWVASISAGSSFTDYAASVRGRFTISRNIANSLYLQMNRLRAEDTAVYYCARVIGDGTILGVVFDYWGPGTLVTVSS

SEQ ID NO: 1603 - protein, 9 aa, Artificial Sequence
  Description of Artificial Sequence: Synthetic heavy chain variable region CDR H1
FAFSSYSLH

SEQ ID NO: 1604 - DNA, 27 bp, Artificial Sequence
  Description of Artificial Sequence: Synthetic heavy chain variable region CDR H1
ttcgccttcagtagctatagtttacac

SEQ ID NO: 1605 - protein, 17 aa, Artificial Sequence
  Description of Artificial Sequence: Synthetic heavy chain variable region CDR H2
SISAGSSFTDYAASVRG

SEQ ID NO: 1606 - DNA, 51 bp, Artificial Sequence
  Description of Artificial Sequence: Synthetic heavy chain variable region CDR H2
tcgatcagtgcaggtagcagtttcacagattacgcggcctcagtgaggggc

SEQ ID NO: 1607 - protein, 16 aa, Artificial Sequence
  Description of Artificial Sequence: Synthetic heavy chain variable region CDR H3
ARVIGDGTILGVVFDY

SEQ ID NO: 1608 - DNA, 48 bp, Artificial Sequence
  Description of Artificial Sequence: Synthetic heavy chain variable region CDR H3
gcgagagttatcggagacgggacgattcttggagtggtttttgactac

SEQ ID NO: 1609 - DNA, 330 bp, Artificial Sequence
  Description of Artificial Sequence: Synthetic light chain variable region
cagtctgtcctgacgcagccgccctcagtgtctggggccccagggcagagggtcaccatctcctgcactgggggcaggtccaacatcggggccggttatgatgtacactggtaccagcaacttccagggacagcccccaaactcctcatctatggtaacatcaatcggccctcaggggtccctgaccgattctctggctccaagtctggcacctcagcctccctggccatcactgggctcctggctgaggatgaggctgattattactgccagtcctatgacagcagcctgagtgtgattttcggcggagggaccaagctcaccgtccta

SEQ ID NO: 1610 - protein, 110 aa, Artificial Sequence
  Description of Artificial Sequence: Synthetic light chain variable region
QSVLTQPPSVSGAPGQRVTISCTGGRSNIGAGYDVHWYQQLPGTAPKLLIYGNINRPSGVPDRFSGSKSGTSASLAITGLLAEDEADYYCQSYDSSLSVIFGGGTKLTVL

SEQ ID NO: 1611 - protein, 14 aa, Artificial Sequence
  Description of Artificial Sequence: Synthetic light chain variable region CDR L1
TGGRSNIGAGYDVH

SEQ ID NO: 1612 - DNA, 42 bp, Artificial Sequence
  Description of Artificial Sequence: Synthetic light chain variable region CDR L1
actgggggcaggtccaacatcggggccggttatgatgtacac

SEQ ID NO: 1613 - protein, 7 aa, Artificial Sequence
  Description of Artificial Sequence: Synthetic light chain variable region CDR L2
GNINRPS

SEQ ID NO: 1614 - DNA, 21 bp, Artificial Sequence
  Description of Artificial Sequence: Synthetic light chain variable region CDR L2
ggtaacatcaatcggccctca

SEQ ID NO: 1615 - protein, 10 aa, Artificial Sequence
  Description of Artificial Sequence: Synthetic light chain variable region CDR L3
QSYDSSLSVI

SEQ ID NO: 1616 - DNA, 30 bp, Artificial Sequence
  Description of Artificial Sequence: Synthetic light chain variable region CDR L3
cagtcctatgacagcagcctgagtgtgatt

SEQ ID NO: 1617 - DNA, 372 bp, Artificial Sequence
  Description of Artificial Sequence: Synthetic heavy chain variable region
caggtccagctggtgcagtctggagcagaggtgaaaaagcccggggagtctctgaagatctcctgtaagggttctggatacgtctttagtagttactgggtcgcctgggtgcgccagatgcccgggaaaggcctggagtggatggggatcatctatcctcatgactctgataccagatacagcccggccttccaaggccaggtcaccatttcagccgataagtccatcaacaccgcctacctgcagtggagcagcctgaaggcctcggacaccgccatgtattactgcaccattatactaataccagctcctatacgggcccctgatggttttgatatctggggccaagggaccacggtcaccgtctcctca

SEQ ID NO: 1618 - protein, 124 aa, Artificial Sequence
  Description of Artificial Sequence: Synthetic heavy chain variable region
QVQLVQSGAEVKKPGESLKISCKGSGYVFSSYWVAWVRQMPGKGLEWMGIIYPHDSDTRYSPAFQGQVTISADKSINTAYLQWSSLKASDTAMYYCTIILIPAPIRAPDGFDIWGQGTTVTVSS

SEQ ID NO: 1619 - protein, 9 aa, Artificial Sequence
  Description of Artificial Sequence: Synthetic heavy chain variable region CDR H1
YVFSSYWVA

SEQ ID NO: 1620 - DNA, 27 bp, Artificial Sequence
  Description of Artificial Sequence: Synthetic heavy chain variable region CDR H1
tacgtctttagtagttactgggtcgcc

SEQ ID NO: 1621 - protein, 17 aa, Artificial Sequence
  Description of Artificial Sequence: Synthetic heavy chain variable region CDR H2
IIYPHDSDTRYSPAFQG

SEQ ID NO: 1622 - DNA, 51 bp, Artificial Sequence
  Description of Artificial Sequence: Synthetic heavy chain variable region CDR H2
atcatctatcctcatgactctgataccagatacagcccggccttccaaggc

SEQ ID NO: 1623 - protein, 17 aa, Artificial Sequence
  Description of Artificial Sequence: Synthetic heavy chain variable region CDR H3
TIILIPAPIRAPDGFDI

SEQ ID NO: 1624 - DNA, 51 bp, Artificial Sequence
  Description of Artificial Sequence: Synthetic heavy chain variable region CDR H3
accattatactaataccagctcctatacgggcccctgatggttttgatatc

SEQ ID NO: 1625 - DNA, 333 bp, Artificial Sequence
  Description of Artificial Sequence: Synthetic light chain variable region
aattttatgctgactcagccccactctgtgtcggagtctccggggaagacggtaaccatctcctgcaccggcagcggtggcaccattgccagcaactatgtgcagtggtaccagcagcgcccgggcagtgtccccaccactgtgatctatgagaataacgaaagaccctctggggtccctgatcggttctctggctccatcgacaggtcctccaactctgcctccctcaccatctctggactgaagactgaggacgaggctgactactactgtcagtcttatgatagcagctatcatgtggtattcggcggagggaccaaggtcaccgtccta

SEQ ID NO: 1626 - protein, 111 aa, Artificial Sequence
  Description of Artificial Sequence: Synthetic light chain variable region
NFMLTQPHSVSESPGKTVTISCTGSGGTIASNYVQWYQQRPGSVPTTVIYENNERPSGVPDRFSGSIDRSSNSASLTISGLKTEDEADYYCQSYDSSYHVVFGGGTKVTVL

SEQ ID NO: 1627 - protein, 13 aa, Artificial Sequence
  Description of Artificial Sequence: Synthetic light chain variable region CDR L1
TGSGGTIASNYVQ

SEQ ID NO: 1628 - DNA, 39 bp, Artificial Sequence
  Description of Artificial Sequence: Synthetic light chain variable region CDR L1
accggcagcggtggcaccattgccagcaactatgtgcag

SEQ ID NO: 1629 - protein, 7 aa, Artificial Sequence
  Description of Artificial Sequence: Synthetic light chain variable region CDR L2
ENNERPS

SEQ ID NO: 1630 - DNA, 21 bp, Artificial Sequence
  Description of Artificial Sequence: Synthetic light chain variable region CDR L2
gagaataacgaaagaccctct

SEQ ID NO: 1631 - protein, 10 aa, Artificial Sequence
  Description of Artificial Sequence: Synthetic light chain variable region CDR L3
QSYDSSYHVV

SEQ ID NO: 1632 - DNA, 30 bp, Artificial Sequence
  Description of Artificial Sequence: Synthetic light chain variable region CDR L3
cagtcttatgatagcagctatcatgtggta

SEQ ID NO: 1633 - DNA, 369 bp, Artificial Sequence
  Description of Artificial Sequence: Synthetic heavy chain variable region
caggtgcagctggtgcagtctggggctgaggtgaagaagcctgggtcctcggtgaaggtctcctgcaaggcctctggagacacgttcagcagctatgctatcagctgggtgcgacaggcccctggacaaggacttgagtggatgggaggggtcctccctatgttagggacagcaaactacgcacagaggttccggggcagagtcacacttaccgcggacggatccacgaacacagcctacatggagatgagcagcctgagacttgacgacacggccgtgtattactgtgcgagagtggccggtctgggaaatagctacggtcgataccctgacctctggggccagggaaccctggtcaccgtctcctca

SEQ ID NO: 1634 - protein, 123 aa, Artificial Sequence
  Description of Artificial Sequence: Synthetic heavy chain variable region
QVQLVQSGAEVKKPGSSVKVSCKASGDTFSSYAISWVRQAPGQGLEWMGGVLPMLGTANYAQRFRGRVTLTADGSTNTAYMEMSSLRLDDTAVYYCARVAGLGNSYGRYPDLWGQGTLVTVSS

SEQ ID NO: 1635 - protein, 9 aa, Artificial Sequence
  Description of Artificial Sequence: Synthetic heavy chain variable region CDR H1
DTFSSYAIS

SEQ ID NO: 1636 - DNA, 27 bp, Artificial Sequence
  Description of Artificial Sequence: Synthetic heavy chain variable region CDR H1
gacacgttcagcagctatgctatcagc

SEQ ID NO: 1637 - protein, 17 aa, Artificial Sequence
  Description of Artificial Sequence: Synthetic heavy chain variable region CDR H2
GVLPMLGTANYAQRFRG

SEQ ID NO: 1638 - DNA, 51 bp, Artificial Sequence
  Description of Artificial Sequence: Synthetic heavy chain variable region CDR H2
ggggtcctccctatgttagggacagcaaactacgcacagaggttccggggc

SEQ ID NO: 1639 - protein, 16 aa, Artificial Sequence
  Description of Artificial Sequence: Synthetic heavy chain variable region CDR H3
ARVAGLGNSYGRYPDL

SEQ ID NO: 1640 - DNA, 48 bp, Artificial Sequence
  Description of Artificial Sequence: Synthetic heavy chain variable region CDR H3
gcgagagtggccggtctgggaaatagctacggtcgataccctgacctc

SEQ ID NO: 1641 - DNA, 321 bp, Artificial Sequence
  Description of Artificial Sequence: Synthetic light chain variable region
gatattgtgatgacccagtctccatcttctctgtctgcatctgttggagacagagtcaccatcacttgtcgggcgagtcagggtattagcagctcgttagcctggtatcagcagaaaccagggaaagcccctgagctcctgatctatgctgcatccagtttgcacagtggggtcccatcgaggttccggggcagtggatctgggacagacttcactctcactatcagcagcgtgcagcctgaagattttgcaacttactattgtcaacaggcaaacagtttcccgtacacttttggccaggggaccaagctggagatcaaa

SEQ ID NO: 1642 - protein, 107 aa, Artificial Sequence
  Description of Artificial Sequence: Synthetic light chain variable region
DIVMTQSPSSLSASVGDRVTITCRASQGISSSLAWYQQKPGKAPELLIYAASSLHSGVPSRFRGSGSGTDFTLTISSVQPEDFATYYCQQANSFPYTFGQGTKLEIK

SEQ ID NO: 1643 - protein, 11 aa, Artificial Sequence
  Description of Artificial Sequence: Synthetic light chain variable region CDR L1
RASQGISSSLA

SEQ ID NO: 1644 - DNA, 33 bp, Artificial Sequence
  Description of Artificial Sequence: Synthetic light chain variable region CDR L1
cgggcgagtcagggtattagcagctcgttagcc

SEQ ID NO: 1645 - protein, 7 aa, Artificial Sequence
  Description of Artificial Sequence: Synthetic light chain variable region CDR L2
AASSLHS

SEQ ID NO: 1646 - DNA, 21 bp, Artificial Sequence
  Description of Artificial Sequence: Synthetic light chain variable region CDR L2
gctgcatccagtttgcacagt

SEQ ID NO: 1647 - protein, 9 aa, Artificial Sequence
  Description of Artificial Sequence: Synthetic light chain variable region CDR L3
QQANSFPYT

SEQ ID NO: 1648 - DNA, 27 bp, Artificial Sequence
  Description of Artificial Sequence: Synthetic light chain variable region CDR L3
caacaggcaaacagtttcccgtacact

SEQ ID NO: 1649 - DNA, 363 bp, Artificial Sequence
  Description of Artificial Sequence: Synthetic heavy chain variable region
caggtccagcttgtacagtctggagcagaggtgaaaaagccgggggagtctctgaagatctcctgtaagggtgcaggattcggctctaccaactcctggatcggctgggtgcgccagatgcccgggaaaggcctggagtggatgggggtcatctttccaggtgactctgataccaaatacagcccgaccttccaaggccaggtcaccatctcagtcgacaagtccatcaacaccgcctacctgcagtggagcagcctgaaggcctcggacaccgccatctattactgtgcgagaatgctggcttctgttggtttgtccaactttgacgcgtggggccagggaaccctggtcaccgtctcctca

SEQ ID NO: 1650 - protein, 121 aa, Artificial Sequence
  Description of Artificial Sequence: Synthetic heavy chain variable region
QVQLVQSGAEVKKPGESLKISCKGAGFGSTNSWIGWVRQMPGKGLEWMGVIFPGDSDTKYSPTFQGQVTISVDKSINTAYLQWSSLKASDTAIYYCARMLASVGLSNFDAWGQGTLVTVSS

SEQ ID NO: 1651 - protein, 9 aa, Artificial Sequence
  Description of Artificial Sequence: Synthetic heavy chain variable region CDR H1
FGSTNSWIG

SEQ ID NO: 1652 - DNA, 27 bp, Artificial Sequence
  Description of Artificial Sequence: Synthetic heavy chain variable region CDR H1
ttcggctctaccaactcctggatcggc

SEQ ID NO: 1653 - protein, 17 aa, Artificial Sequence
  Description of Artificial Sequence: Synthetic heavy chain variable region CDR H2
VIFPGDSDTKYSPTFQG

SEQ ID NO: 1654 - DNA, 51 bp, Artificial Sequence
  Description of Artificial Sequence: Synthetic heavy chain variable region CDR H2
gtcatctttccaggtgactctgataccaaatacagcccgaccttccaaggc

SEQ ID NO: 1655 - protein, 14 aa, Artificial Sequence
  Description of Artificial Sequence: Synthetic heavy chain variable region CDR H3
ARMLASVGLSNFDA

SEQ ID NO: 1656 - DNA, 42 bp, Artificial Sequence
  Description of Artificial Sequence: Synthetic heavy chain variable region CDR H3
gcgagaatgctggcttctgttggtttgtccaactttgacgcg

SEQ ID NO: 1657 - DNA, 324 bp, Artificial Sequence
  Description of Artificial Sequence: Synthetic light chain variable region
cagcctgtgctgactcagccaccctcagtgtcactggccccaggaaagacggccacgattacctgtgggggaaacaacattggaggtaaaagtgtgcactggtaccagcagaagccaggccaggcccctgtgctggtcatcgattatgatagcgaccggccctcagggatccctgagcgattctctggctccaactctgggaacacggccaccctgaccatcaacagggtcgaagccggggatgaggccgactactactgtcaggtgtgggatagtattagtgatcatgtgttattcggtggagggaccaagctgaccgtccta

SEQ ID NO: 1658 - protein, 108 aa, Artificial Sequence
  Description of Artificial Sequence: Synthetic light chain variable region
QPVLTQPPSVSLAPGKTATITCGGNNIGGKSVHWYQQKPGQAPVLVIDYDSDRPSGIPERFSGSNSGNTATLTINRVEAGDEADYYCQVWDSISDHVLFGGGTKLTVL

SEQ ID NO: 1659 - protein, 11 aa, Artificial Sequence
  Description of Artificial Sequence: Synthetic light chain variable region CDR L1
GGNNIGGKSVH

SEQ ID NO: 1660 - DNA, 33 bp, Artificial Sequence
  Description of Artificial Sequence: Synthetic light chain variable region CDR L1
gggggaaacaacattggaggtaaaagtgtgcac

SEQ ID NO: 1661 - protein, 7 aa, Artificial Sequence
  Description of Artificial Sequence: Synthetic light chain variable region CDR L2
YDSDRPS

SEQ ID NO: 1662 - DNA, 21 bp, Artificial Sequence
  Description of Artificial Sequence: Synthetic light chain variable region CDR L2
tatgatagcgaccggccctca

SEQ ID NO: 1663 - protein, 11 aa, Artificial Sequence
  Description of Artificial Sequence: Synthetic light chain variable region CDR L3
QVWDSISDHVL

SEQ ID NO: 1664 - DNA, 33 bp, Artificial Sequence
  Description of Artificial Sequence: Synthetic light chain variable region CDR L3
caggtgtgggatagtattagtgatcatgtgtta

SEQ ID NO: 1665 - DNA, 390 bp, Artificial Sequence
  Description of Artificial Sequence: Synthetic heavy chain variable region
gaggtgcagctggtggagtctgggggaggcttggttaagcctggggggtcccttagactctcttgtgcagcctctggattcactttcagtaacgcctggatgagctgggtccgccaggctccagggaaggggctggagtgggttggccgtgttaaaagcaaatctaaaggtgggacaacacactacgctgaagccgtgaagggcagattcaccatttcaagagatgattcaaaaaacacgctgtacctccaaatgcagagcctgaaaaccgaggacacagccgtctattactgtacctcccacgcgtataatagtgactggttcgtgacgactgactactactactacatggacgtctggggcaaagggaccacggtcaccgtctcctca

SEQ ID NO: 1666 - protein, 130 aa, Artificial Sequence
  Description of Artificial Sequence: Synthetic heavy chain variable region
EVQLVESGGGLVKPGGSLRLSCAASGFTFSNAWMSWVRQAPGKGLEWVGRVKSKSKGGTTHYAEAVKGRFTISRDDSKNTLYLQMQSLKTEDTAVYYCTSHAYNSDWFVTTDYYYYMDVWGKGTTVTVSS

SEQ ID NO: 1667 - protein, 9 aa, Artificial Sequence
  Description of Artificial Sequence: Synthetic heavy chain variable region CDR H1
FTFSNAWMS

SEQ ID NO: 1668 - DNA, 27 bp, Artificial Sequence
  Description of Artificial Sequence: Synthetic heavy chain variable region CDR H1
ttcactttcagtaacgcctggatgagc

SEQ ID NO: 1669 - protein, 19 aa, Artificial Sequence
  Description of Artificial Sequence: Synthetic heavy chain variable region CDR H2
RVKSKSKGGTTHYAEAVKG

SEQ ID NO: 1670 - DNA, 57 bp, Artificial Sequence
  Description of Artificial Sequence: Synthetic heavy chain variable region CDR H2
cgtgttaaaagcaaatctaaaggtgggacaacacactacgctgaagccgtgaagggc

SEQ ID NO: 1671 - protein, 21 aa, Artificial Sequence
  Description of Artificial Sequence: Synthetic heavy chain variable region CDR H3
TSHAYNSDWFVTTDYYYYMDV

SEQ ID NO: 1672 - DNA, 63 bp, Artificial Sequence
  Description of Artificial Sequence: Synthetic heavy chain variable region CDR H3
acctcccacgcgtataatagtgactggttcgtgacgactgactactactactacatggacgtc

SEQ ID NO: 1673 - DNA, 321 bp, Artificial Sequence
  Description of Artificial Sequence: Synthetic light chain variable region
gatattgtgctgacccagtctccatcctccctgtctgcatctgttggagacagagtcaccttcacttgccgggcaagtcagagcattagcaactatttgaattggtatcagcagaaaccagggaaagcccctaaggtcctgatctatggtgcttccaatttgctaagtggggtcccatcaaggttcattggcagcggatctgggacagatttcactctcaccatcaacagtctgcaacctgaagattttgcaacttactactgtcaacagtgttacagtgccccgatcaccttcggccaagggacacgactggagattaaa

SEQ ID NO: 1674 - protein, 107 aa, Artificial Sequence
  Description of Artificial Sequence: Synthetic light chain variable region
DIVLTQSPSSLSASVGDRVTFTCRASQSISNYLNWYQQKPGKAPKVLIYGASNLLSGVPSRFIGSGSGTDFTLTINSLQPEDFATYYCQQCYSAPITFGQGTRLEIK

SEQ ID NO: 1675 - protein, 11 aa, Artificial Sequence
  Description of Artificial Sequence: Synthetic light chain variable region CDR L1
RASQSISNYLN

SEQ ID NO: 1676 - DNA, 33 bp, Artificial Sequence
  Description of Artificial Sequence: Synthetic light chain variable region CDR L1
cgggcaagtcagagcattagcaactatttgaat

SEQ ID NO: 1677 - protein, 7 aa, Artificial Sequence
  Description of Artificial Sequence: Synthetic light chain variable region CDR L2
GASNLLS

SEQ ID NO: 1678 - DNA, 21 bp, Artificial Sequence
  Description of Artificial Sequence: Synthetic light chain variable region CDR L2
ggtgcttccaatttgctaagt

SEQ ID NO: 1679 - protein, 9 aa, Artificial Sequence
  Description of Artificial Sequence: Synthetic light chain variable region CDR L3
QQCYSAPIT

SEQ ID NO: 1680 - DNA, 27 bp, Artificial Sequence
  Description of Artificial Sequence: Synthetic light chain variable region CDR L3
caacagtgttacagtgccccgatcacc

SEQ ID NO: 1681 - DNA, 390 bp, Artificial Sequence
  Description of Artificial Sequence: Synthetic heavy chain variable region
caggtccagctggtgcagtctggggctgaggtgaagaagcctgggtcctcggtgaaggtctcctgcacggcctctggaggcagcttcagcaccaatagtattgcctggctgaggcagacccctagagaagggctggagtggatgggaggaatcatccctgtctttggtgcagcaaaatacgcacagaagttccagggcagagtcacgattagcgcggacgcatccacgaccacagcctacttggagctgcacaacctgagatctgaggacactgccgtctattactgcgcgagaggaatttcccccaggacaaacagtgactggaaccacaactacttctactactacatggacgtctggggcaaagggaccacggtcaccgtctcctca

SEQ ID NO: 1682 - protein, 130 aa, Artificial Sequence
  Description of Artificial Sequence: Synthetic heavy chain variable region
QVQLVQSGAEVKKPGSSVKVSCTASGGSFSTNSIAWLRQTPREGLEWMGGIIPVFGAAKYAQKFQGRVTISADASTTTAYLELHNLRSEDTAVYYCARGISPRTNSDWNHNYFYYYMDVWGKGTTVTVSS

SEQ ID NO: 1683 - protein, 9 aa, Artificial Sequence
  Description of Artificial Sequence: Synthetic heavy chain variable region CDR H1
GSFSTNSIA

SEQ ID NO: 1684 - DNA, 27 bp, Artificial Sequence
  Description of Artificial Sequence: Synthetic heavy chain variable region CDR H1
ggcagcttcagcaccaatagtattgcc

SEQ ID NO: 1685 - protein, 17 aa, Artificial Sequence
  Description of Artificial Sequence: Synthetic heavy chain variable region CDR H2
GIIPVFGAAKYAQKFQG

SEQ ID NO: 1686 - DNA, 51 bp, Artificial Sequence
  Description of Artificial Sequence: Synthetic heavy chain variable region CDR H2
ggaatcatccctgtctttggtgcagcaaaatacgcacagaagttccagggc

SEQ ID NO: 1687 - protein, 23 aa, Artificial Sequence
  Description of Artificial Sequence: Synthetic heavy chain variable region CDR H3
ARGISPRTNSDWNHNYFYYYMDV

SEQ ID NO: 1688 - DNA, 69 bp, Artificial Sequence
  Description of Artificial Sequence: Synthetic heavy chain variable region CDR H3
gcgagaggaatttcccccaggacaaacagtgactggaaccacaactacttctactactacatggacgtc

SEQ ID NO: 1689 - DNA, 324 bp, Artificial Sequence
  Description of Artificial Sequence: Synthetic light chain variable region
gaaacgacactcacgcagtctccaggcaccctgtctttgtctccaggggagagagccaccctctcctgccgggccagtcagagtattttcaccatctacttagcctggtaccagcagaaacctggccaggctcccagactcctcatctatagtgcatccaacagggccactggcatcccagacaggttcagtggcagtgggtctgggacagacttcactctcaccatcagcagcctggagcctgaagattttgcagtctattactgccaccactatggtacctcacctcacacttttggccaggggacacgactggagattaaa

SEQ ID NO: 1690 - protein, 108 aa, Artificial Sequence
  Description of Artificial Sequence: Synthetic light chain variable region
ETTLTQSPGTLSLSPGERATLSCRASQSIFTIYLAWYQQKPGQAPRLLIYSASNRATGIPDRFSGSGSGTDFTLTISSLEPEDFAVYYCHHYGTSPHTFGQGTRLEIK

SEQ ID NO: 1691 - protein, 12 aa, Artificial Sequence
  Description of Artificial Sequence: Synthetic light chain variable region CDR L1
RASQSIFTIYLA

SEQ ID NO: 1692 - DNA, 36 bp, Artificial Sequence
  Description of Artificial Sequence: Synthetic light chain variable region CDR L1
cgggccagtcagagtattttcaccatctacttagcc

SEQ ID NO: 1693 - protein, 7 aa, Artificial Sequence
  Description of Artificial Sequence: Synthetic light chain variable region CDR L2
SASNRAT

SEQ ID NO: 1694 - DNA, 21 bp, Artificial Sequence
  Description of Artificial Sequence: Synthetic light chain variable region CDR L2
agtgcatccaacagggccact

SEQ ID NO: 1695 - protein, 9 aa, Artificial Sequence
  Description of Artificial Sequence: Synthetic light chain variable region CDR L3
HHYGTSPHT

SEQ ID NO: 1696 - DNA, 27 bp, Artificial Sequence
  Description of Artificial Sequence: Synthetic light chain variable region CDR L3
caccactatggtacctcacctcacact

SEQ ID NO: 1697 - DNA, 360 bp, Artificial Sequence
  Description of Artificial Sequence: Synthetic heavy chain variable region
gaggtgcagctgttggagtctggtcctgtgctggtgaaacccacagagaccctcacgctgacctgcaccgtctctgggttctcactcgccaatcctgacgtggctgtggcctggatccgtcagccccccgggaaggccctggagtggcttgcacacattttttcgggcgacgaaacatcctacaccacatctctgcagaacagactcaccatctccaaggacacctccaaaagccaggttgtccttatcatgaccaagatggaccctcgagacaccggcacatatttctgtgcacgggtgttgactacctggcacggaccggactactggggccaggggaccacggtcaccgtctcctca

SEQ ID NO: 1698 - protein, 120 aa, Artificial Sequence
  Description of Artificial Sequence: Synthetic heavy chain variable region
EVQLLESGPVLVKPTETLTLTCTVSGFSLANPDVAVAWIRQPPGKALEWLAHIFSGDETSYTTSLQNRLTISKDTSKSQVVLIMTKMDPRDTGTYFCARVLTTWHGPDYWGQGTTVTVSS

SEQ ID NO: 1699 - protein, 11 aa, Artificial Sequence
  Description of Artificial Sequence: Synthetic heavy chain variable region CDR H1
FSLANPDVAVA

SEQ ID NO: 1700 - DNA, 33 bp, Artificial Sequence
  Description of Artificial Sequence: Synthetic heavy chain variable region CDR H1
ttctcactcgccaatcctgacgtggctgtggcc

SEQ ID NO: 1701 - protein, 16 aa, Artificial Sequence
  Description of Artificial Sequence: Synthetic heavy chain variable region CDR H2
HIFSGDETSYTTSLQN

SEQ ID NO: 1702 - DNA, 48 bp, Artificial Sequence
  Description of Artificial Sequence: Synthetic heavy chain variable region CDR H2
cacattttttcgggcgacgaaacatcctacaccacatctctgcagaac

SEQ ID NO: 1703 - protein, 12 aa, Artificial Sequence
  Description of Artificial Sequence: Synthetic heavy chain variable region CDR H3
ARVLTTWHGPDY

SEQ ID NO: 1704 - DNA, 36 bp, Artificial Sequence
  Description of Artificial Sequence: Synthetic heavy chain variable region CDR H3
gcacgggtgttgactacctggcacggaccggactac

SEQ ID NO: 1705 - DNA, 336 bp, Artificial Sequence
  Description of Artificial Sequence: Synthetic light chain variable region
gaaacgacactcacgcagtctccactctccctgcccgtcacccttggacagccggcctccatctcctgcaggtctgatcaaagcctcgtatatcataatggaaacacctacgtgagttggtttcatcagaggccaggccaatctccaaggcgcctaatttataaggtttctatccgggactctggggtcccagacagattcagcggcagtgggtcaggcactgatttcgcactgaaaatcagcagggtggaggctgaggatcttggggtttattactgcatgcaaggttcacactggccgcacacttttggccaggggaccaaagtggatatcaaa

SEQ ID NO: 1706 - protein, 112 aa, Artificial Sequence
  Description of Artificial Sequence: Synthetic light chain variable region
ETTLTQSPLSLPVTLGQPASISCRSDQSLVYHNGNTYVSWFHQRPGQSPRRLIYKVSIRDSGVPDRFSGSGSGTDFALKISRVEAEDLGVYYCMQGSHWPHTFGQGTKVDIK

SEQ ID NO: 1707 - protein, 16 aa, Artificial Sequence
  Description of Artificial Sequence: Synthetic light chain variable region CDR L1
RSDQSLVYHNGNTYVS

SEQ ID NO: 1708 - DNA, 48 bp, Artificial Sequence
  Description of Artificial Sequence: Synthetic light chain variable region CDR L1
aggtctgatcaaagcctcgtatatcataatggaaacacctacgtgagt

SEQ ID NO: 1709 - protein, 7 aa, Artificial Sequence
  Description of Artificial Sequence: Synthetic light chain variable region CDR L2
KVSIRDS

SEQ ID NO: 1710 - DNA, 21 bp, Artificial Sequence
  Description of Artificial Sequence: Synthetic light chain variable region CDR L2
aaggtttctatccgggactct

SEQ ID NO: 1711 - protein, 9 aa, Artificial Sequence
  Description of Artificial Sequence: Synthetic light chain variable region CDR L3
MQGSHWPHT

SEQ ID NO: 1712 - DNA, 27 bp, Artificial Sequence
  Description of Artificial Sequence: Synthetic light chain variable region CDR L3
atgcaaggttcacactggccgcacact

SEQ ID NO: 1713 - DNA, 366 bp, Artificial Sequence
  Description of Artificial Sequence: Synthetic heavy chain variable region
gaggtgcagctggtggagtctgggggaggcttggtccagcctggggggtccctgagactctcctgtgcagcctctggattctcgtttagtacctcttggatgagttgggtccgccaggctccagggaaaggtctggagtggctggccaacataaaggaagatggaagtaagaaaatctatgtggactctgtgaagggccgcttctccatatccagggacaacgccaagaactcactgtatctgcaaatgaccagcctaagagccgaggacacggccgtgtattattgtgcgagagatgtgtgggggtgggagctagtcggatggttggacccctggggccagggaaccctggtcaccgtctcctca

SEQ ID NO: 1714 - protein, 122 aa, Artificial Sequence
  Description of Artificial Sequence: Synthetic heavy chain variable region
EVQLVESGGGLVQPGGSLRLSCAASGFSFSTSWMSWVRQAPGKGLEWLANIKEDGSKKIYVDSVKGRFSISRDNAKNSLYLQMTSLRAEDTAVYYCARDVWGWELVGWLDPWGQGTLVTVSS

SEQ ID NO: 1715 - protein, 9 aa, Artificial Sequence
  Description of Artificial Sequence: Synthetic heavy chain variable region CDR H1
FSFSTSWMS

SEQ ID NO: 1716 - DNA, 27 bp, Artificial Sequence
  Description of Artificial Sequence: Synthetic heavy chain variable region CDR H1
ttctcgtttagtacctcttggatgagt

SEQ ID NO: 1717 - protein, 17 aa, Artificial Sequence
  Description of Artificial Sequence: Synthetic heavy chain variable region CDR H2
NIKEDGSKKIYVDSVKG

SEQ ID NO: 1718 - DNA, 51 bp, Artificial Sequence
  Description of Artificial Sequence: Synthetic heavy chain variable region CDR H2
aacataaaggaagatggaagtaagaaaatctatgtggactctgtgaagggc

SEQ ID NO: 1719 - protein, 15 aa, Artificial Sequence
  Description of Artificial Sequence: Synthetic heavy chain variable region CDR H3
ARDVWGWELVGWLDP

SEQ ID NO: 1720 - DNA, 45 bp, Artificial Sequence
  Description of Artificial Sequence: Synthetic heavy chain variable region CDR H3
gcgagagatgtgtgggggtgggagctagtcggatggttggacccc

SEQ ID NO: 1721 - DNA, 324 bp, Artificial Sequence
  Description of Artificial Sequence: Synthetic light chain variable region
tcctatgagctgacacagccaccctcggtatcagtggccccaggaaagacggccagcattacctgtgggggaagcaacattggaagtagaagtgtgcactggtaccagcagaagccaggccaggcccctgtgctggtcgtctatgaggatcacgaccggccctcagggatccctgagcgattctctggctccaactctgggaatacggccaccctgaccatcagcagggtcgaagccggggacgaggccgactattactgtcaggtgtgggatagtagtagagatcatgtggtattcggcggcgggaccaaggtcaccgtccta

SEQ ID NO: 1722 - protein, 108 aa, Artificial Sequence
  Description of Artificial Sequence: Synthetic light chain variable region
SYELTQPPSVSVAPGKTASITCGGSNIGSRSVHWYQQKPGQAPVLVVYEDHDRPSGIPERFSGSNSGNTATLTISRVEAGDEADYYCQVWDSSRDHVVFGGGTKVTVL

SEQ ID NO: 1723 - protein, 11 aa, Artificial Sequence
  Description of Artificial Sequence: Synthetic light chain variable region CDR L1
GGSNIGSRSVH

SEQ ID NO: 1724 - DNA, 33 bp, Artificial Sequence
  Description of Artificial Sequence: Synthetic light chain variable region CDR L1
gggggaagcaacattggaagtagaagtgtgcac

SEQ ID NO: 1725 - protein, 7 aa, Artificial Sequence
  Description of Artificial Sequence: Synthetic light chain variable region CDR L2
EDHDRPS

SEQ ID NO: 1726 - DNA, 21 bp, Artificial Sequence
  Description of Artificial Sequence: Synthetic light chain variable region CDR L2
gaggatcacgaccggccctca

SEQ ID NO: 1727 - protein, 11 aa, Artificial Sequence
  Description of Artificial Sequence: Synthetic light chain variable region CDR L3
QVWDSSRDHVV

SEQ ID NO: 1728 - DNA, 33 bp, Artificial Sequence
  Description of Artificial Sequence: Synthetic light chain variable region CDR L3
caggtgtgggatagtagtagagatcatgtggta

SEQ ID NO: 1729 - DNA, 378 bp, Artificial Sequence
  Description of Artificial Sequence: Synthetic heavy chain variable region
gaggtgcagctggtggagtctggtcctgcgctggtgaaacccacacagaccctcacactgacctgcaccttctctgggttctcactcagcagtagaagaatgtgtgtgagttggatccgtcagcccccagggaaggccctggagtggcttgcacgcattgattgggatgatgataaatcctacagcacatctctgaagaccaggctcaccatcgccaaggacacctccaaaaaccaggtcgtccttacaatgaccaacatgggccccgcggacacagccacgtattactgtgcacggactcctatatatgatagtagtggttattacctctactactttgactcctggggccagggaaccctggtcaccgtctcctca

SEQ ID NO: 1730 - protein, 126 aa, Artificial Sequence
  Description of Artificial Sequence: Synthetic heavy chain variable region
EVQLVESGPALVKPTQTLTLTCTFSGFSLSSRRMCVSWIRQPPGKALEWLARIDWDDDKSYSTSLKTRLTIAKDTSKNQVVLTMTNMGPADTATYYCARTPIYDSSGYYLYYFDSWGQGTLVTVSS

SEQ ID NO: 1731 - protein, 11 aa, Artificial Sequence
  Description of Artificial Sequence: Synthetic heavy chain variable region CDR H1
FSLSSRRMCVS

SEQ ID NO: 1732 - DNA, 33 bp, Artificial Sequence
  Description of Artificial Sequence: Synthetic heavy chain variable region CDR H1
ttctcactcagcagtagaagaatgtgtgtgagt

SEQ ID NO: 1733 - protein, 16 aa, Artificial Sequence
  Description of Artificial Sequence: Synthetic heavy chain variable region CDR H2
RIDWDDDKSYSTSLKT

SEQ ID NO: 1734 - DNA, 48 bp, Artificial Sequence; identical to SEQ ID NO: 582
  Description of Artificial Sequence: Synthetic heavy chain variable region CDR H2

SEQ ID NO: 1735 - protein, 18 aa, Artificial Sequence
  Description of Artificial Sequence: Synthetic heavy chain variable region CDR H3
ARTPIYDSSGYYLYYFDS

SEQ ID NO: 1736 - DNA, 54 bp, Artificial Sequence
  Description of Artificial Sequence: Synthetic heavy chain variable region CDR H3
gcacggactcctatatatgatagtagtggttattacctctactactttgactcc

SEQ ID NO: 1737 - DNA, 321 bp, Artificial Sequence
  Description of Artificial Sequence: Synthetic light chain variable region
gaaacgacactcacgcagtctccatcctccctgtctgcatctgtcggagacagagtcaccatcacttgccgggcaagtcagagcattagcagctatttaaattggtatcagcagaaaccagggaaagcccctaagctcctgatctatgctgcatccagtttgcaaagtggggtcccatcaaggttcagtggcagtggatctgggacagatttcactctcaccatcagcagtctgcaacctgaagattttgcaacttactactgtcaacagagttacagtacccctgtgacttttggccaggggaccaaggtggagatcaaa

SEQ ID NO: 1738 - protein, 107 aa, Artificial Sequence
  Description of Artificial Sequence: Synthetic light chain variable region
ETTLTQSPSSLSASVGDRVTITCRASQSISSYLNWYQQKPGKAPKLLIYAASSLQSGVPSRFSGSGSGTDFTLTISSLQPEDFATYYCQQSYSTPVTFGQGTKVEIK

SEQ ID NO: 1739 - protein, 11 aa, Artificial Sequence
  Description of Artificial Sequence: Synthetic light chain variable region CDR L1
RASQSISSYLN

SEQ ID NO: 1740 - DNA, 33 bp, Artificial Sequence
  Description of Artificial Sequence: Synthetic light chain variable region CDR L1
cgggcaagtcagagcattagcagctatttaaat

SEQ ID NO: 1741 - protein, 7 aa, Artificial Sequence
  Description of Artificial Sequence: Synthetic light chain variable region CDR L2
AASSLQS

SEQ ID NO: 1742 - DNA, 21 bp, Artificial Sequence
  Description of Artificial Sequence: Synthetic light chain variable region CDR L2
gctgcatccagtttgcaaagt

SEQ ID NO: 1743 - protein, 9 aa, Artificial Sequence
  Description of Artificial Sequence: Synthetic light chain variable region CDR L3
QQSYSTPVT

SEQ ID NO: 1744 - DNA, 27 bp, Artificial Sequence
  Description of Artificial Sequence: Synthetic light chain variable region CDR L3
caacagagttacagtacccctgtgact

SEQ ID NO: 1745 - DNA, 372 bp, Artificial Sequence
  Description of Artificial Sequence: Synthetic heavy chain variable region
caggtccagcttgtgcagtctgggggaggcgtggtccagcctgggaggtccctgagactctcctgtgcagcctctggattcaccttcagtgactatgctatgcactgggtccgccaggctccaggcaagggcctccagtgggtgtcacttatatcatataatggacgtaaaaaatattacgcagactccgtgaagggccgattcaccatctccagagacgattccaagaacacgctgtatctgcaaatgaaccccctgagacctgacgacacggctgtctattactgtgcgagagatggggatattgtagctgttccagctgctatcgggttggactactggggccagggaaccctggtcaccgtctcctca

SEQ ID NO: 1746 - protein, 124 aa, Artificial Sequence
  Description of Artificial Sequence: Synthetic heavy chain variable region
QVQLVQSGGGVVQPGRSLRLSCAASGFTFSDYAMHWVRQAPGKGLQWVSLISYNGRKKYYADSVKGRFTISRDDSKNTLYLQMNPLRPDDTAVYYCARDGDIVAVPAAIGLDYWGQGTLVTVSS

SEQ ID NO: 1747 - protein, 9 aa, Artificial Sequence
  Description of Artificial Sequence: Synthetic heavy chain variable region CDR H1
FTFSDYAMH

SEQ ID NO: 1748 - DNA, 27 bp, Artificial Sequence
  Description of Artificial Sequence: Synthetic heavy chain variable region CDR H1
ttcaccttcagtgactatgctatgcac

SEQ ID NO: 1749 - protein, 17 aa, Artificial Sequence
  Description of Artificial Sequence: Synthetic heavy chain variable region CDR H2
LISYNGRKKYYADSVKG

SEQ ID NO: 1750 - DNA, 51 bp, Artificial Sequence
  Description of Artificial Sequence: Synthetic heavy chain variable region CDR H2
cttatatcatataatggacgtaaaaaatattacgcagactccgtgaagggc

SEQ ID NO: 1751 - protein, 17 aa, Artificial Sequence
  Description of Artificial Sequence: Synthetic heavy chain variable region CDR H3
ARDGDIVAVPAAIGLDY

SEQ ID NO: 1752 - DNA, 51 bp, Artificial Sequence
  Description of Artificial Sequence: Synthetic heavy chain variable region CDR H3
gcgagagatggggatattgtagctgttccagctgctatcgggttggactac

SEQ ID NO: 1753 - DNA, 339 bp, Artificial Sequence
  Description of Artificial Sequence: Synthetic light chain variable region
gatattgtgctgacccagtctccagagtccctggctgtgtctctgggcgagagggccaccatcaactgcaactccagccagagtgttttatacacctccaacaacaagaactacttagcttggtaccagcagaaatcaggacagcctcctaagctgctcatttactgggcatctacccgggaatccggggtccctgagcgattcagtggcagcgggtctgggacagatttcactctcaccatcagcagcctgcaggctgaagatgtggcagtttattactgtcagcaatattctagtcctccgtacacttttggccaggggaccaagctggagatcaaa

SEQ ID NO: 1754 - protein, 113 aa, Artificial Sequence
  Description of Artificial Sequence: Synthetic light chain variable region
DIVLTQSPESLAVSLGERATINCNSSQSVLYTSNNKNYLAWYQQKSGQPPKLLIYWASTRESGVPERFSGSGSGTDFTLTISSLQAEDVAVYYCQQYSSPPYTFGQGTKLEIK

SEQ ID NO: 1755 - protein, 17 aa, Artificial Sequence
  Description of Artificial Sequence: Synthetic light chain variable region CDR L1
NSSQSVLYTSNNKNYLA

SEQ ID NO: 1756 - DNA, 51 bp, Artificial Sequence
  Description of Artificial Sequence: Synthetic light chain variable region CDR L1
aactccagccagagtgttttatacacctccaacaacaagaactacttagct

SEQ ID NO: 1757 - protein, 7 aa, Artificial Sequence
  Description of Artificial Sequence: Synthetic light chain variable region CDR L2
WASTRES

SEQ ID NO: 1758 - DNA, 21 bp, Artificial Sequence
  Description of Artificial Sequence: Synthetic light chain variable region CDR L2
tgggcatctacccgggaatcc

SEQ ID NO: 1759 - protein, 9 aa, Artificial Sequence
  Description of Artificial Sequence: Synthetic light chain variable region CDR L3
QQYSSPPYT

SEQ ID NO: 1760 - DNA, 27 bp, Artificial Sequence
  Description of Artificial Sequence: Synthetic light chain variable region CDR L3
cagcaatattctagtcctccgtacact

SEQ ID NO: 1761 - DNA, 366 bp, Artificial Sequence
  Description of Artificial Sequence: Synthetic heavy chain variable region
caggtgcagctgcaggagtccggcccaggactagtgaagccttcagagaccctgtccctcacttgcagtgtctctggtggctccatcaaaagaggtgcttacttctggacctggatccgccagcggccagggaagggcctggagtggattgggtccatgcatgacagcggcgactactacaacccgtccctcaagacacgcgttaccattttgggagacacgactaagaaccacttcaccctgaagttgacctccgtgactgtcgcggacacggccttatattactgtgcgagggggcgcggatacagctatggctggcgtttctttgacaactggggccagggaaccctggtcaccgtctcctca

SEQ ID NO: 1762 - protein, 122 aa, Artificial Sequence
  Description of Artificial Sequence: Synthetic heavy chain variable region
QVQLQESGPGLVKPSETLSLTCSVSGGSIKRGAYFWTWIRQRPGKGLEWIGSMHDSGDYYNPSLKTRVTILGDTTKNHFTLKLTSVTVADTALYYCARGRGYSYGWRFFDNWGQGTLVTVSS

SEQ ID NO: 1763 - protein, 11 aa, Artificial Sequence
  Description of Artificial Sequence: Synthetic heavy chain variable region CDR H1
GSIKRGAYFWT

SEQ ID NO: 1764 - DNA, 33 bp, Artificial Sequence
  Description of Artificial Sequence: Synthetic heavy chain variable region CDR H1
ggctccatcaaaagaggtgcttacttctggacc

SEQ ID NO: 1765 - protein, 15 aa, Artificial Sequence
  Description of Artificial Sequence: Synthetic heavy chain variable region CDR H2
SMHDSGDYYNPSLKT

SEQ ID NO: 1766 - DNA, 45 bp, Artificial Sequence
  Description of Artificial Sequence: Synthetic heavy chain variable region CDR H2
tccatgcatgacagcggcgactactacaacccgtccctcaagaca

SEQ ID NO: 1767 - protein, 15 aa, Artificial Sequence
  Description of Artificial Sequence: Synthetic heavy chain variable region CDR H3
ARGRGYSYGWRFFDN

SEQ ID NO: 1768 - DNA, 45 bp, Artificial Sequence
  Description of Artificial Sequence: Synthetic heavy chain variable region CDR H3
gcgagggggcgcggatacagctatggctggcgtttctttgacaac

SEQ ID NO: 1769 - DNA, 324 bp, Artificial Sequence
  Description of Artificial Sequence: Synthetic light chain variable region
aattttatgctgactcagcccccctcggtgtcagtgtccccaggacactcgaccaggatcacctgctctggagatgctttgccaaagcaatatgcttattggtatcagcagaagccaggccaggcccctgtcctgataatgtccaaagacagtgagaggccctcagggatccctgagcgattcactggctccagctcagggactacagtcactttgaccatcagtggagtccaggcagaggacgaggccgactattactgtcaatcaggagacaccagtggaagttatgtcgtcttcggcggagggaccaaggtcaccgtccta

SEQ ID NO: 1770 - protein, 108 aa, Artificial Sequence
  Description of Artificial Sequence: Synthetic light chain variable region
NFMLTQPPSVSVSPGHSTRITCSGDALPKQYAYWYQQKPGQAPVLIMSKDSERPSGIPERFTGSSSGTTVTLTISGVQAEDEADYYCQSGDTSGSYVVFGGGTKVTVL

SEQ ID NO: 1771 - protein, 11 aa, Artificial Sequence
  Description of Artificial Sequence: Synthetic light chain variable region CDR L1
SGDALPKQYAY

SEQ ID NO: 1772 - DNA, 33 bp, Artificial Sequence
  Description of Artificial Sequence: Synthetic light chain variable region CDR L1
tctggagatgctttgccaaagcaatatgcttat

SEQ ID NO: 1773 - protein, 7 aa, Artificial Sequence
  Description of Artificial Sequence: Synthetic light chain variable region CDR L2
KDSERPS

SEQ ID NO: 1774 - DNA, 21 bp, Artificial Sequence
  Description of Artificial Sequence: Synthetic light chain variable region CDR L2
aaagacagtgagaggccctca

SEQ ID NO: 1775 - protein, 11 aa, Artificial Sequence
  Description of Artificial Sequence: Synthetic light chain variable region CDR L3
QSGDTSGSYVV

SEQ ID NO: 1776 - DNA, 33 bp, Artificial Sequence
  Description of Artificial Sequence: Synthetic light chain variable region CDR L3
caatcaggagacaccagtggaagttatgtcgtc

SEQ ID NO: 1777 - DNA, 390 bp, Artificial Sequence
  Description of Artificial Sequence: Synthetic heavy chain variable region
gaggtgcagctgttggagtccgggccagagttgaagaagcctgggtcctcggtgaaggtgtcttgcaaggcctctgcagacactttcaatggtcactcaattgcttgggtgcggcaggcccctggacaagggcttgagtgggtgggaggattcatccccatttttgggaaagcatactacgcacagaacttccagggcacagtcacgatttccgcggattcttccacgagaacagtctacatggatctgttcaacctgagatctgaggacacggccgtctattactgtgcgagatcaaggaaaaatgttatcggggacaccagtgcctgggaacatatgtacttctacatggacgtctggggcaccgggaccacggtcaccgtctcctca

SEQ ID NO: 1778 - protein, 130 aa, Artificial Sequence
  Description of Artificial Sequence: Synthetic heavy chain variable region
EVQLLESGPELKKPGSSVKVSCKASADTFNGHSIAWVRQAPGQGLEWVGGFIPIFGKAYYAQNFQGTVTISADSSTRTVYMDLFNLRSEDTAVYYCARSRKNVIGDTSAWEHMYFYMDVWGTGTTVTVSS

SEQ ID NO: 1779 - protein, 9 aa, Artificial Sequence
  Description of Artificial Sequence: Synthetic heavy chain variable region CDR H1
DTFNGHSIA

SEQ ID NO: 1780 - DNA, 27 bp, Artificial Sequence
  Description of Artificial Sequence: Synthetic heavy chain variable region CDR H1
gacactttcaatggtcactcaattgct

SEQ ID NO: 1781 - protein, 17 aa, Artificial Sequence
  Description of Artificial Sequence: Synthetic heavy chain variable region CDR H2
GFIPIFGKAYYAQNFQG

SEQ ID NO: 1782 - DNA, 51 bp, Artificial Sequence
  Description of Artificial Sequence: Synthetic heavy chain variable region CDR H2
ggattcatccccatttttgggaaagcatactacgcacagaacttccagggc

SEQ ID NO: 1783 - protein, 23 aa, Artificial Sequence
  Description of Artificial Sequence: Synthetic heavy chain variable region CDR H3
ARSRKNVIGDTSAWEHMYFYMDV

SEQ ID NO: 1784 - DNA, 69 bp, Artificial Sequence
  Description of Artificial Sequence: Synthetic heavy chain variable region CDR H3
gcgagatcaaggaaaaatgttatcggggacaccagtgcctgggaacatatgtacttctacatggacgtc

SEQ ID NO: 1785 - DNA, 324 bp, Artificial Sequence
  Description of Artificial Sequence: Synthetic light chain variable region
gaaattgtattgacgcagtctccaggcaccctgtctttgtctccaggggaaagagtcactctctcctgcagggccagtgagagtattaataagaatacctacttagcctggtaccaacagaaacctggccaggctcccaggctcctcatttatggagcatccagcagggccactggcatcccagacaggttcagtggcagtgggtctgggacagacttcactctcaccatcagcagactggagcctgaagattctgctgtgtattactgtcagcaatatggtaggtcaatgactttcggcggagggaccaaggtggaaatcaaa

SEQ ID NO: 1786 - protein, 108 aa, Artificial Sequence
  Description of Artificial Sequence: Synthetic light chain variable region
EIVLTQSPGTLSLSPGERVTLSCRASESINKNTYLAWYQQKPGQAPRLLIYGASSRATGIPDRFSGSGSGTDFTLTISRLEPEDSAVYYCQQYGRSMTFGGGTKVEIK

SEQ ID NO: 1787 - protein, 13 aa, Artificial Sequence
  Description of Artificial Sequence: Synthetic light chain variable region CDR L1
RASESINKNTYLA

SEQ ID NO: 1788 - DNA, 39 bp, Artificial Sequence
  Description of Artificial Sequence: Synthetic light chain variable region CDR L1
agggccagtgagagtattaataagaatacctacttagcc

SEQ ID NO: 1789 - protein, 7 aa, Artificial Sequence
  Description of Artificial Sequence: Synthetic light chain variable region CDR L2
GASSRAT

SEQ ID NO: 1790 - DNA, 21 bp, Artificial Sequence
  Description of Artificial Sequence: Synthetic light chain variable region CDR L2
ggagcatccagcagggccact

SEQ ID NO: 1791 - protein, 8 aa, Artificial Sequence
  Description of Artificial Sequence: Synthetic light chain variable region CDR L3
QQYGRSMT

SEQ ID NO: 1792 - DNA, 24 bp, Artificial Sequence
  Description of Artificial Sequence: Synthetic light chain variable region CDR L3
cagcaatatggtaggtcaatgact

SEQ ID NO: 1793 - DNA, 393 bp, Artificial Sequence
  Description of Artificial Sequence: Synthetic heavy chain variable region
caggtccagcttgtacagtctgggactgaggtgaagaagcctgggtcctcggtgaatgtctcctgcaaggctgttggaggcaagttcaccagttataatattaactgggtgcgacaggcccctggacaaggccttgagtggatgggaaggatcatcccaacccttggtataacatacttcgcacagaagttccagggcagactcacgattaacgcggacagatccacgagcaccgcctacatggatctgagcagcctgagatctgacgatacggccgtttattattgtgcgagatccaatcccgttgctcgcgatttttggagtggatattctgacgactcctcctatgctatggacgtctggggccaagggaccacggtcaccgtctcctca

SEQ ID NO: 1794 - protein, 131 aa, Artificial Sequence
  Description of Artificial Sequence: Synthetic heavy chain variable region
QVQLVQSGTEVKKPGSSVNVSCKAVGGKFTSYNINWVRQAPGQGLEWMGRIIPTLGITYFAQKFQGRLTINADRSTSTAYMDLSSLRSDDTAVYYCARSNPVARDFWSGYSDDSSYAMDVWGQGTTVTVSS

SEQ ID NO: 1795 - protein, 9 aa, Artificial Sequence
  Description of Artificial Sequence: Synthetic heavy chain variable region CDR H1
GKFTSYNIN

SEQ ID NO: 1796 - DNA, 27 bp, Artificial Sequence
  Description of Artificial Sequence: Synthetic heavy chain variable region CDR H1
ggcaagttcaccagttataatattaac

SEQ ID NO: 1797 - protein, 17 aa, Artificial Sequence
  Description of Artificial Sequence: Synthetic heavy chain variable region CDR H2
RIIPTLGITYFAQKFQG

SEQ ID NO: 1798 - DNA, 51 bp, Artificial Sequence
  Description of Artificial Sequence: Synthetic heavy chain variable region CDR H2
aggatcatcccaacccttggtataacatacttcgcacagaagttccagggc

SEQ ID NO: 1799 - protein, 24 aa, Artificial Sequence
  Description of Artificial Sequence: Synthetic heavy chain variable region CDR H3
ARSNPVARDFWSGYSDDSSYAMDV

SEQ ID NO: 1800 - DNA, 72 bp, Artificial Sequence
  Description of Artificial Sequence: Synthetic heavy chain variable region CDR H3
gcgagatccaatcccgttgctcgcgatttttggagtggatattctgacgactcctcctatgctatggacgtc

SEQ ID NO: 1801 - DNA, 324 bp, Artificial Sequence
  Description of Artificial Sequence: Synthetic light chain variable region
gaaacgacactcacgcagtctccaggaaccctgtctttgtctccaggggacagagtcagcctctcctgcagggccagtcagactgttgacaagaactacgtagcctggtaccagcagaagcctggccaggctcccaggctcctcatctatggtgcatccaagagggccgctgacatcccagacaggttcagtggcagtggctctggggcagacttcactctcaccatcagcagactggagcctgaagattttgctgtgtatcactgtcagcagtatggagcttcagcgttcagtttcggcggcgggaccaagctggagatcaaa

SEQ ID NO: 1802 - protein, 108 aa, Artificial Sequence
  Description of Artificial Sequence: Synthetic light chain variable region
ETTLTQSPGTLSLSPGDRVSLSCRASQTVDKNYVAWYQQKPGQAPRLLIYGASKRAADIPDRFSGSGSGADFTLTISRLEPEDFAVYHCQQYGASAFSFGGGTKLEIK

SEQ ID NO: 1803 - protein, 12 aa, Artificial Sequence
  Description of Artificial Sequence: Synthetic light chain variable region CDR L1
RASQTVDKNYVA

SEQ ID NO: 1804 - DNA, 36 bp, Artificial Sequence
  Description of Artificial Sequence: Synthetic light chain variable region CDR L1
agggccagtcagactgttgacaagaactacgtagcc

SEQ ID NO: 1805 - protein, 7 aa, Artificial Sequence
  Description of Artificial Sequence: Synthetic light chain variable region CDR L2
GASKRAA

SEQ ID NO: 1806 - DNA, 21 bp, Artificial Sequence
  Description of Artificial Sequence: Synthetic light chain variable region CDR L2
ggtgcatccaagagggccgct

SEQ ID NO: 1807 - protein, 9 aa, Artificial Sequence
  Description of Artificial Sequence: Synthetic light chain variable region CDR L3
QQYGASAFS

SEQ ID NO: 1808 - DNA, 27 bp, Artificial Sequence
  Description of Artificial Sequence: Synthetic light chain variable region CDR L3
cagcagtatggagcttcagcgttcagt

SEQ ID NO: 1809 - DNA, 384 bp, Artificial Sequence
  Description of Artificial Sequence: Synthetic heavy chain variable region
caggtgcagctggtgcaatctgggggaggcttggtaaagccgggggggtcccttagactctcatgtgcagcctctggattcgctttcagtaacgcctggatgagctgggtccgccaggctccagggaaggggctggagtggcttggccgtattaaaagcgaaactgacggtgggacaacagactacgctgcacccgtgaaaggcagattcagcatctcaagagatgattccagaaacacgctgtatctgcaaatgaacagcctggaaagcgaggacacagccgtttattactgtaccacaggcccaccctataagtattttgatagtactggttattcggtcgttgactactggggccagggaaccctggtcaccgtctcctca

SEQ ID NO: 1810 - protein, 128 aa, Artificial Sequence
  Description of Artificial Sequence: Synthetic heavy chain variable region
QVQLVQSGGGLVKPGGSLRLSCAASGFAFSNAWMSWVRQAPGKGLEWLGRIKSETDGGTTDYAAPVKGRFSISRDDSRNTLYLQMNSLESEDTAVYYCTTGPPYKYFDSTGYSVVDYWGQGTLVTVSS

SEQ ID NO: 1811 - protein, 9 aa, Artificial Sequence
  Description of Artificial Sequence: Synthetic heavy chain variable region CDR H1
FAFSNAWMS

SEQ ID NO: 1812 - DNA, 27 bp, Artificial Sequence
  Description of Artificial Sequence: Synthetic heavy chain variable region CDR H1
ttcgctttcagtaacgcctggatgagc

SEQ ID NO: 1813 - protein, 19 aa, Artificial Sequence
  Description of Artificial Sequence: Synthetic heavy chain variable region CDR H2
RIKSETDGGTTDYAAPVKG

SEQ ID NO: 1814 - DNA, 57 bp, Artificial Sequence
  Description of Artificial Sequence: Synthetic heavy chain variable region CDR H2
cgtattaaaagcgaaactgacggtgggacaacagactacgctgcacccgtgaaaggc

SEQ ID NO: 1815 - protein, 19 aa, Artificial Sequence
  Description of Artificial Sequence: Synthetic heavy chain variable region CDR H3
TTGPPYKYFDSTGYSVVDY

SEQ ID NO: 1816 - DNA, 57 bp, Artificial Sequence
  Description of Artificial Sequence: Synthetic heavy chain variable region CDR H3
accacaggcccaccctataagtattttgatagtactggttattcggtcgttgactac

SEQ ID NO: 1817 - DNA, 330 bp, Artificial Sequence
  Description of Artificial Sequence: Synthetic light chain variable region
tcctatgagctgacacagccaccctcagcgtctgggacccccgggcagagggtcaccatctcttgttctggaagcagctccaatatcggaagtaattatgtatactggtaccagcagctcccaggaacggcccccagactcctcatctatagtactaatcagcggccctcaggggtccctgaccgattctctggctcccagtctggcacctcagcctccctggccatcagtgggctccggtccgacgatgaggctgattattactgtgcagcatgggatgacaggatgagtggtccggtgttcggcggagggaccaagctcaccgtccta

SEQ ID NO: 1818 - protein, 110 aa, Artificial Sequence
  Description of Artificial Sequence: Synthetic light chain variable region
SYELTQPPSASGTPGQRVTISCSGSSSNIGSNYVYWYQQLPGTAPRLLIYSTNQRPSGVPDRFSGSQSGTSASLAISGLRSDDEADYYCAAWDDRMSGPVFGGGTKLTVL

SEQ ID NO: 1819 - protein, 13 aa, Artificial Sequence
  Description of Artificial Sequence: Synthetic light chain variable region CDR L1
SGSSSNIGSNYVY

SEQ ID NO: 1820 - DNA, 39 bp, Artificial Sequence
  Description of Artificial Sequence: Synthetic light chain variable region CDR L1
tctggaagcagctccaatatcggaagtaattatgtatac

SEQ ID NO: 1821 - protein, 7 aa, Artificial Sequence
  Description of Artificial Sequence: Synthetic light chain variable region CDR L2
STNQRPS

SEQ ID NO: 1822 - DNA, 21 bp, Artificial Sequence
  Description of Artificial Sequence: Synthetic light chain variable region CDR L2
agtactaatcagcggccctca

SEQ ID NO: 1823 - protein, 11 aa, Artificial Sequence
  Description of Artificial Sequence: Synthetic light chain variable region CDR L3
AAWDDRMSGPV

SEQ ID NO: 1824 - DNA, 33 bp, Artificial Sequence
  Description of Artificial Sequence: Synthetic light chain variable region CDR L3
gcagcatgggatgacaggatgagtggtccggtg

SEQ ID NO: 1825 - DNA, 372 bp, Artificial Sequence
  Description of Artificial Sequence: Synthetic heavy chain variable region
caggtccagcttgtacagtctgggggaggcttggtgcagcctggggggtccctaagactctcctgtgcagcctctggactcacctttagctcttatgccatgtcctgggtccgccaggctccagggaaggaactggagtgggtctcatctattagtgaaagtggtgttgatacatactacgcagactccgtgaagggccggttcaccgtctccagagacaattccaaaagcacgctgtatctgcaaatgagcagcctgggaggcgacgacacggccgtatattattgcgcgaaggcatactgtagtaataaggcctgccacgggggctactttgactactggggccagggaaccctggtcaccgtctcctca

SEQ ID NO: 1826 - protein, 124 aa, Artificial Sequence
  Description of Artificial Sequence: Synthetic heavy chain variable region
QVQLVQSGGGLVQPGGSLRLSCAASGLTFSSYAMSWVRQAPGKELEWVSSISESGVDTYYADSVKGRFTVSRDNSKSTLYLQMSSLGGDDTAVYYCAKAYCSNKACHGGYFDYWGQGTLVTVSS

SEQ ID NO: 1827 - protein, 9 aa, Artificial Sequence
  Description of Artificial Sequence: Synthetic heavy chain variable region CDR H1
LTFSSYAMS

SEQ ID NO: 1828 - DNA, 27 bp, Artificial Sequence
  Description of Artificial Sequence: Synthetic heavy chain variable region CDR H1
ctcacctttagctcttatgccatgtcc

SEQ ID NO: 1829 - protein, 17 aa, Artificial Sequence
  Description of Artificial Sequence: Synthetic heavy chain variable region CDR H2
SISESGVDTYYADSVKG

SEQ ID NO: 1830 - DNA, 51 bp, Artificial Sequence
  Description of Artificial Sequence: Synthetic heavy chain variable region CDR H2
tctattagtgaaagtggtgttgatacatactacgcagactccgtgaagggc

SEQ ID NO: 1831 - protein, 17 aa, Artificial Sequence
  Description of Artificial Sequence: Synthetic heavy chain variable region CDR H3
AKAYCSNKACHGGYFDY

SEQ ID NO: 1832 - DNA, 51 bp, Artificial Sequence
  Description of Artificial Sequence: Synthetic heavy chain variable region CDR H3
gcgaaggcatactgtagtaataaggcctgccacgggggctactttgactac

SEQ ID NO: 1833 - DNA, 321 bp, Artificial Sequence
  Description of Artificial Sequence: Synthetic light chain variable region
gaaacgacactcacgcagtctccagacaccctgtccttgtctccaggggaaagggccaccctctcctgcagggccagtcagagtgttaggaactacttagcctggtaccggcagaaacctggccaggctcccaggctcctcatctatgatgcatccaacctggccactggcatcccagccaggttcagtggcagcgggtctgggacagacttcactctcaccatcagcagcctagagcctgaagattttgcagtttattactgtcaccagcgtagcgactggccgctcactttcggccctgggaccaaggtggaaatcaaa

SEQ ID NO: 1834 - protein, 107 aa, Artificial Sequence
  Description of Artificial Sequence: Synthetic light chain variable region
ETTLTQSPDTLSLSPGERATLSCRASQSVRNYLAWYRQKPGQAPRLLIYDASNLATGIPARFSGSGSGTDFTLTISSLEPEDFAVYYCHQRSDWPLTFGPGTKVEIK

SEQ ID NO: 1835 - protein, 11 aa, Artificial Sequence
  Description of Artificial Sequence: Synthetic light chain variable region CDR L1
RASQSVRNYLA

SEQ ID NO: 1836 - DNA, 33 bp, Artificial Sequence
  Description of Artificial Sequence: Synthetic light chain variable region CDR L1
agggccagtcagagtgttaggaactacttagcc

SEQ ID NO: 1837 - protein, 7 aa, Artificial Sequence
  Description of Artificial Sequence: Synthetic light chain variable region CDR L2
DASNLAT

SEQ ID NO: 1838 - DNA, 21 bp, Artificial Sequence
  Description of Artificial Sequence: Synthetic light chain variable region CDR L2
gatgcatccaacctggccact

SEQ ID NO: 1839 - protein, 9 aa, Artificial Sequence
  Description of Artificial Sequence: Synthetic light chain variable region CDR L3
HQRSDWPLT

SEQ ID NO: 1840 - DNA, 27 bp, Artificial Sequence
  Description of Artificial Sequence: Synthetic light chain variable region CDR L3
caccagcgtagcgactggccgctcact

SEQ ID NO: 1841 - DNA, 360 bp, Artificial Sequence
  Description of Artificial Sequence: Synthetic heavy chain variable region
gaggtgcagctggtggagtcggggggaggcttggtccagcctggggggtccctgagactctcctgtgcagcctctggattcacctttaggagctattggatgacctgggtccgccaggctccagggaaagggctggagtgggtggccagcataaacgatgaggggaatactaaatactatgtggactctctgaagggccgattcaccatctccagagacaacgccaagaactcactttatctccaaatgaacagcctgcgagccgaggacacggctgtttattactgtgcgagggagtccggtctgccccggggtgcctttcaaatctggggcccagggacaatggtcaccgtctcttca

SEQ ID NO: 1842 - protein, 120 aa, Artificial Sequence
  Description of Artificial Sequence: Synthetic heavy chain variable region
EVQLVESGGGLVQPGGSLRLSCAASGFTFRSYWMTWVRQAPGKGLEWVASINDEGNTKYYVDSLKGRFTISRDNAKNSLYLQMNSLRAEDTAVYYCARESGLPRGAFQIWGPGTMVTVSS

SEQ ID NO: 1843 - protein, 9 aa, Artificial Sequence
  Description of Artificial Sequence: Synthetic heavy chain variable region CDR H1
FTFRSYWMT

SEQ ID NO: 1844 - DNA, 27 bp, Artificial Sequence
  Description of Artificial Sequence: Synthetic heavy chain variable region CDR H1
ttcacctttaggagctattggatgacc

SEQ ID NO: 1845 - protein, 17 aa, Artificial Sequence
  Description of Artificial Sequence: Synthetic heavy chain variable region CDR H2
SINDEGNTKYYVDSLKG

SEQ ID NO: 1846 - DNA, 51 bp, Artificial Sequence
  Description of Artificial Sequence: Synthetic heavy chain variable region CDR H2
agcataaacgatgaggggaatactaaatactatgtggactctctgaagggc

SEQ ID NO: 1847 - protein, 13 aa, Artificial Sequence
  Description of Artificial Sequence: Synthetic heavy chain variable region CDR H3
ARESGLPRGAFQI

SEQ ID NO: 1848 - DNA, 39 bp, Artificial Sequence
  Description of Artificial Sequence: Synthetic heavy chain variable region CDR H3
gcgagggagtccggtctgccccggggtgcctttcaaatc

SEQ ID NO: 1849 - DNA, 318 bp, Artificial Sequence
  Description of Artificial Sequence: Synthetic light chain variable region
gaaattgtattgacacagtctccagtcaccctgtctttgtctccaggggaaagagccaccctctcatgcagggccagtcagagtgttggcaccttcttagcctggtatcaacacaaacctggccaggctcccaggctcctcatctatgatgcatccaacagggcctctgccatcccagccaggttcagtggcagtgggtctgggacagacttcactctcaccatcagcagcctggagcctgaagattttgcagtttattactgtcagcatcgtagcgactggtggacgttcggccaagggaccaaggtggaaatcaaa

SEQ ID NO: 1850 - protein, 106 aa, Artificial Sequence
  Description of Artificial Sequence: Synthetic light chain variable region
EIVLTQSPVTLSLSPGERATLSCRASQSVGTFLAWYQHKPGQAPRLLIYDASNRASAIPARFSGSGSGTDFTLTISSLEPEDFAVYYCQHRSDWWTFGQGTKVEIK

SEQ ID NO: 1851 - protein, 11 aa, Artificial Sequence
  Description of Artificial Sequence: Synthetic light chain variable region CDR L1
RASQSVGTFLA

SEQ ID NO: 1852 - DNA, 33 bp, Artificial Sequence
  Description of Artificial Sequence: Synthetic light chain variable region CDR L1
agggccagtcagagtgttggcaccttcttagcc

SEQ ID NO: 1853 - protein, 7 aa, Artificial Sequence
  Description of Artificial Sequence: Synthetic light chain variable region CDR L2
DASNRAS

SEQ ID NO: 1854 - DNA, 21 bp, Artificial Sequence
  Description of Artificial Sequence: Synthetic light chain variable region CDR L2
gatgcatccaacagggcctct

SEQ ID NO: 1855 - protein, 8 aa, Artificial Sequence
  Description of Artificial Sequence: Synthetic light chain variable region CDR L3
QHRSDWWT

SEQ ID NO: 1856 - DNA, 24 bp, Artificial Sequence
  Description of Artificial Sequence: Synthetic light chain variable region CDR L3
cagcatcgtagcgactggtggacg

SEQ ID NO: 1857 - DNA, 366 bp, Artificial Sequence
  Description of Artificial Sequence: Synthetic heavy chain variable region
caggtgcagctacagcagtggggcgcaggactgttgaagccttcggagaccctgtccctcacctgccaagtctatggtgtgtccttcagtgattactactggaactggatccgccagtccccagggaagggactggagtggattggggacgtcaatcatattggaaacaccgactacaacccgtccctcaagagtcgagtctccatatcagtagacacgtccaagaaccagttctccctcaccctgcgctctgtgaccgccgcagacacggctctatactactgtgcgagaggccgtaaactttttgaagtgcctcccaaggcccccgactactggggccagggaaccctggtcaccgtctcctca

SEQ ID NO: 1858 - protein, 122 aa, Artificial Sequence
  Description of Artificial Sequence: Synthetic heavy chain variable region
QVQLQQWGAGLLKPSETLSLTCQVYGVSFSDYYWNWIRQSPGKGLEWIGDVNHIGNTDYNPSLKSRVSISVDTSKNQFSLTLRSVTAADTALYYCARGRKLFEVPPKAPDYWGQGTLVTVSS

SEQ ID NO: 1859 - protein, 9 aa, Artificial Sequence
  Description of Artificial Sequence: Synthetic heavy chain variable region CDR H1
VSFSDYYWN

SEQ ID NO: 1860 - DNA, 27 bp, Artificial Sequence
  Description of Artificial Sequence: Synthetic heavy chain variable region CDR H1
gtgtccttcagtgattactactggaac

SEQ ID NO: 1861 - protein, 16 aa, Artificial Sequence
  Description of Artificial Sequence: Synthetic heavy chain variable region CDR H2
DVNHIGNTDYNPSLKS

SEQ ID NO: 1862 - DNA, 48 bp, Artificial Sequence
  Description of Artificial Sequence: Synthetic heavy chain variable region CDR H2
gacgtcaatcatattggaaacaccgactacaacccgtccctcaagagt

SEQ ID NO: 1863 - protein, 16 aa, Artificial Sequence
  Description of Artificial Sequence: Synthetic heavy chain variable region CDR H3
ARGRKLFEVPPKAPDY

SEQ ID NO: 1864 - DNA, 48 bp, Artificial Sequence
  Description of Artificial Sequence: Synthetic heavy chain variable region CDR H3
gcgagaggccgtaaactttttgaagtgcctcccaaggcccccgactac

SEQ ID NO: 1865 - DNA, 324 bp, Artificial Sequence
  Description of Artificial Sequence: Synthetic light chain variable region
gatattgtgatgacgcagtctccaggcaccctgtctttgtctccaggggaaagagccaccctctcctgcagggccagtcagagtgtgagcagcacctacttagcctggtaccagcagaagcctggccaggctcccaggctcctcatctatggtgcgtccatcagggccactggcatcccagacaggttcagtggcgttgggtctgggacagacttcactctcaccatcagcagactggagcctgaagatgttgcagtgtattactgtcagcagtatgggagctcacctcagacgttcggccaagggaccaaggtggaaatcaaa

SEQ ID NO: 1866 - protein, 108 aa, Artificial Sequence
  Description of Artificial Sequence: Synthetic light chain variable region
DIVMTQSPGTLSLSPGERATLSCRASQSVSSTYLAWYQQKPGQAPRLLIYGASIRATGIPDRFSGVGSGTDFTLTISRLEPEDVAVYYCQQYGSSPQTFGQGTKVEIK

SEQ ID NO: 1867 - protein, 12 aa, Artificial Sequence
  Description of Artificial Sequence: Synthetic light chain variable region CDR L1
RASQSVSSTYLA

SEQ ID NO: 1868 - DNA, 36 bp, Artificial Sequence
  Description of Artificial Sequence: Synthetic light chain variable region CDR L1
agggccagtcagagtgtgagcagcacctacttagcc

SEQ ID NO: 1869 - protein, 7 aa, Artificial Sequence
  Description of Artificial Sequence: Synthetic light chain variable region CDR L2
GASIRAT

SEQ ID NO: 1870 - DNA, 21 bp, Artificial Sequence
  Description of Artificial Sequence: Synthetic light chain variable region CDR L2
ggtgcgtccatcagggccact

SEQ ID NO: 1871 - protein, 9 aa, Artificial Sequence
  Description of Artificial Sequence: Synthetic light chain variable region CDR L3
QQYGSSPQT

SEQ ID NO: 1872 - DNA, 27 bp, Artificial Sequence
  Description of Artificial Sequence: Synthetic light chain variable region CDR L3
cagcagtatgggagctcacctcagacg

SEQ ID NO: 1873 - DNA, 369 bp, Artificial Sequence
  Description of Artificial Sequence: Synthetic heavy chain variable region
caggtgcagctggtggagtctgggggaggcttgattcagcctggggcgtccctgagactctcctgtggagcctatggattcagtttcagcagctctgccatgagctgggtccgccaggctccaggtaaggggctggagtgggtctcagctattagtgataatggtggtagcacatactacgcagactccgtgcagggccggttcaccatctccagagacaattccaagaacacgctgtatctgcaactgaacaggctgagagccgaggacacggccatatattactgtgcgaaagcatattgtagtgatagctgccacgggggctactttgactactggggccagggaaccctggtcaccgtctcctca

SEQ ID NO: 1874 - protein, 123 aa, Artificial Sequence
  Description of Artificial Sequence: Synthetic heavy chain variable region
QVQLVESGGGLIQPGASLRLSCGAYGFSFSSSAMSWVRQAPGKGLEWVSAISDNGGSTYYADSVQGRFTISRDNSKNTLYLQLNRLRAEDTAIYYCAKAYCSDSCHGGYFDYWGQGTLVTVSS

SEQ ID NO: 1875 - protein, 9 aa, Artificial Sequence
  Description of Artificial Sequence: Synthetic heavy chain variable region CDR H1
FSFSSSAMS

SEQ ID NO: 1876 - DNA, 27 bp, Artificial Sequence
  Description of Artificial Sequence: Synthetic heavy chain variable region CDR H1
ttcagtttcagcagctctgccatgagc

SEQ ID NO: 1877 - protein, 17 aa, Artificial Sequence
  Description of Artificial Sequence: Synthetic heavy chain variable region CDR H2
AISDNGGSTYYADSVQG

SEQ ID NO: 1878 - DNA, 51 bp, Artificial Sequence
  Description of Artificial Sequence: Synthetic heavy chain variable region CDR H2
gctattagtgataatggtggtagcacatactacgcagactccgtgcagggc

SEQ ID NO: 1879 - protein, 16 aa, Artificial Sequence
  Description of Artificial Sequence: Synthetic heavy chain variable region CDR H3
AKAYCSDSCHGGYFDY

SEQ ID NO: 1880 - DNA, 48 bp, Artificial Sequence
  Description of Artificial Sequence: Synthetic heavy chain variable region CDR H3
gcgaaagcatattgtagtgatagctgccacgggggctactttgactac

SEQ ID NO: 1881 - DNA, 321 bp, Artificial Sequence
  Description of Artificial Sequence: Synthetic light chain variable region
gaaattgtgttgacgcagtctccagccaccctgtctttgtctccaggggatagagccaccctctcctgcagggccagtcagagtgttagcagctccttcgcctggtaccaacagaaacctggccaggctcccaggctcctcatctatgctgtatccaacagggccactggcatcccagccaggttcagtggcagtgggtctgggacagacttcactctcaccatcagcaccctagagcctgaagactttgcagtttattactgtcagcagcgtagcacctggccgctcactttcggccctgggaccaaggtggagatcaaa

SEQ ID NO: 1882 - protein, 107 aa, Artificial Sequence
  Description of Artificial Sequence: Synthetic light chain variable region
EIVLTQSPATLSLSPGDRATLSCRASQSVSSSFAWYQQKPGQAPRLLIYAVSNRATGIPARFSGSGSGTDFTLTISTLEPEDFAVYYCQQRSTWPLTFGPGTKVEIK

SEQ ID NO: 1883 - protein, 11 aa, Artificial Sequence
  Description of Artificial Sequence: Synthetic light chain variable region CDR L1
RASQSVSSSFA

SEQ ID NO: 1884 - DNA, 33 bp, Artificial Sequence
  Description of Artificial Sequence: Synthetic light chain variable region CDR L1
agggccagtcagagtgttagcagctccttcgcc

SEQ ID NO: 1885 - protein, 7 aa, Artificial Sequence
  Description of Artificial Sequence: Synthetic light chain variable region CDR L2
AVSNRAT

SEQ ID NO: 1886 - DNA, 21 bp, Artificial Sequence
  Description of Artificial Sequence: Synthetic light chain variable region CDR L2
gctgtatccaacagggccact

SEQ ID NO: 1887 - protein, 9 aa, Artificial Sequence
  Description of Artificial Sequence: Synthetic light chain variable region CDR L3
QQRSTWPLT

SEQ ID NO: 1888 - DNA, 27 bp, Artificial Sequence
  Description of Artificial Sequence: Synthetic light chain variable region CDR L3
cagcagcgtagcacctggccgctcact

SEQ ID NO: 1889 - DNA, 384 bp, Artificial Sequence
  Description of Artificial Sequence: Synthetic heavy chain variable region
gaggtgcagctgttggagtcggggggaggcttggtgaagcctggggggtccctaagactctcatgtgcagcctctggattcattttcactaacgcctggatgagctgggtccgccaggctccagggaaggggctggagtgggttggccgtattaaaaggaaaactgaaactgggacaacagactacgctccacccgtgaaaggcagattcaccatctcaagagatgattcaagaagcacgctgtatctgcaaatgaacagcctgaaaaccgaggacacagccgtgtattactgtacgacaggcccaccctatcagtactatgacagtactggttattcggtcgttgactactggggccagggaaccctggtcaccgtctcctca

SEQ ID NO: 1890 - protein, 128 aa, Artificial Sequence
  Description of Artificial Sequence: Synthetic heavy chain variable region
EVQLLESGGGLVKPGGSLRLSCAASGFIFTNAWMSWVRQAPGKGLEWVGRIKRKTETGTTDYAPPVKGRFTISRDDSRSTLYLQMNSLKTEDTAVYYCTTGPPYQYYDSTGYSVVDYWGQGTLVTVSS

SEQ ID NO: 1891 - protein, 9 aa, Artificial Sequence
  Description of Artificial Sequence: Synthetic heavy chain variable region CDR H1
FIFTNAWMS

SEQ ID NO: 1892 - DNA, 27 bp, Artificial Sequence
  Description of Artificial Sequence: Synthetic heavy chain variable region CDR H1
ttcattttcactaacgcctggatgagc

SEQ ID NO: 1893 - protein, 19 aa, Artificial Sequence
  Description of Artificial Sequence: Synthetic heavy chain variable region CDR H2
RIKRKTETGTTDYAPPVKG

SEQ ID NO: 1894 - DNA, 57 bp, Artificial Sequence
  Description of Artificial Sequence: Synthetic heavy chain variable region CDR H2
cgtattaaaaggaaaactgaaactgggacaacagactacgctccacccgtgaaaggc

SEQ ID NO: 1895 - protein, 19 aa, Artificial Sequence
  Description of Artificial Sequence: Synthetic heavy chain variable region CDR H3
TTGPPYQYYDSTGYSVVDY

SEQ ID NO: 1896 - DNA, 57 bp, Artificial Sequence
  Description of Artificial Sequence: Synthetic heavy chain variable region CDR H3
acgacaggcccaccctatcagtactatgacagtactggttattcggtcgttgactac

SEQ ID NO: 1897 - DNA, 342 bp, Artificial Sequence
  Description of Artificial Sequence: Synthetic light chain variable region
tcctatgagctgactcagccaccctcagcgtccgggacccccgggcagagggtcaccatctcttgttctggaagcagctccaacatcggaagtaacatcggaattaattatgtatactggtaccagcagctcccaggaacggcccccaaactcctcatctacagtactaatcagcggccctcaggggtccctgaccgattctctggctcccagtctggcacctcagcctccctggccatcagtgggctccggtccgaggatgaggctgattattactgtgcagcatgggatgacagcctgagtggtccggtgttcggcggagggaccaagctcaccgtccta

SEQ ID NO: 1898 - protein, 114 aa, Artificial Sequence
  Description of Artificial Sequence: Synthetic light chain variable region
SYELTQPPSASGTPGQRVTISCSGSSSNIGSNIGINYVYWYQQLPGTAPKLLIYSTNQRPSGVPDRFSGSQSGTSASLAISGLRSEDEADYYCAAWDDSLSGPVFGGGTKLTVL

SEQ ID NO: 1899 - protein, 17 aa, Artificial Sequence
  Description of Artificial Sequence: Synthetic light chain variable region CDR L1
SGSSSNIGSNIGINYVY

SEQ ID NO: 1900 - DNA, 51 bp, Artificial Sequence
  Description of Artificial Sequence: Synthetic light chain variable region CDR L1
tctggaagcagctccaacatcggaagtaacatcggaattaattatgtatac

SEQ ID NO: 1901 - protein, 7 aa, Artificial Sequence
  Description of Artificial Sequence: Synthetic light chain variable region CDR L2
STNQRPS

SEQ ID NO: 1902 - DNA, 21 bp, Artificial Sequence
  Description of Artificial Sequence: Synthetic light chain variable region CDR L2
agtactaatcagcggccctca

SEQ ID NO: 1903 - protein, 11 aa, Artificial Sequence
  Description of Artificial Sequence: Synthetic light chain variable region CDR L3
AAWDDSLSGPV

SEQ ID NO: 1904 - DNA, 33 bp, Artificial Sequence
  Description of Artificial Sequence: Synthetic light chain variable region CDR L3
gcagcatgggatgacagcctgagtggtccggtg

SEQ ID NO: 1905 - DNA, 360 bp, Artificial Sequence
  Description of Artificial Sequence: Synthetic heavy chain variable region
caggtgcagctggtgcagtctggaccagagttgaaaaagcccggggagtctctgaagatctcctgtaaggcttctggatacagctttacctccttctggatcgcttgggtgcgccagatgcccgggaaaggcctggagtttctggggatcatctatcctggtgacgctgacaccagatacagtccgtccttccaaggccaagtcaccatctcagccgacaagtccatcaacaccgcctacctgcagtggaacaacctgaaggcctcggacaccgccatgtattactgtgcgagacagactacgatgacccccgatgcttttgatctctggggccaagggaccacggtcaccgtctcctca

SEQ ID NO: 1906 - protein, 120 aa, Artificial Sequence
  Description of Artificial Sequence: Synthetic heavy chain variable region
QVQLVQSGPELKKPGESLKISCKASGYSFTSFWIAWVRQMPGKGLEFLGIIYPGDADTRYSPSFQGQVTISADKSINTAYLQWNNLKASDTAMYYCARQTTMTPDAFDLWGQGTTVTVSS

SEQ ID NO: 1907 - protein, 9 aa, Artificial Sequence
  Description of Artificial Sequence: Synthetic heavy chain variable region CDR H1
YSFTSFWIA

SEQ ID NO: 1908 - DNA, 27 bp, Artificial Sequence
  Description of Artificial Sequence: Synthetic heavy chain variable region CDR H1
tacagctttacctccttctggatcgct

SEQ ID NO: 1909 - protein, 17 aa, Artificial Sequence
  Description of Artificial Sequence: Synthetic heavy chain variable region CDR H2
IIYPGDADTRYSPSFQG

SEQ ID NO: 1910 - DNA, 51 bp, Artificial Sequence
  Description of Artificial Sequence: Synthetic heavy chain variable region CDR H2
atcatctatcctggtgacgctgacaccagatacagtccgtccttccaaggc

SEQ ID NO: 1911 - protein, 13 aa, Artificial Sequence
  Description of Artificial Sequence: Synthetic heavy chain variable region CDR H3
ARQTTMTPDAFDL

SEQ ID NO: 1912 - DNA, 39 bp, Artificial Sequence
  Description of Artificial Sequence: Synthetic heavy chain variable region CDR H3
gcgagacagactacgatgacccccgatgcttttgatctc

SEQ ID NO: 1913 - DNA, 324 bp, Artificial Sequence
  Description of Artificial Sequence: Synthetic light chain variable region
gaaattgtgttgacacagtctccagccaccctgtctttgtctccaggggaaagagccactatctcctgcagggccagtcagagtgttagcagctacttagcctggtaccaacagaaacctggccaggctcccaggctcctcatctatgaagcatccgacagggccactggcaccccagccaggttcagtggcagtgggtctgggacagacttcactctcaccatcagcagcctagagcctgaggattttgcagtttattactgtcagcagcgtagtaactggggggtaggaacgttcggccaagggaccaaggtggaaatcaaa

SEQ ID NO: 1914 - protein, 108 aa, Artificial Sequence
  Description of Artificial Sequence: Synthetic light chain variable region
EIVLTQSPATLSLSPGERATISCRASQSVSSYLAWYQQKPGQAPRLLIYEASDRATGTPARFSGSGSGTDFTLTISSLEPEDFAVYYCQQRSNWGVGTFGQGTKVEIK

SEQ ID NO: 1915 - protein, 11 aa, Artificial Sequence
  Description of Artificial Sequence: Synthetic light chain variable region CDR L1
RASQSVSSYLA

SEQ ID NO: 1916 - DNA, 33 bp, Artificial Sequence
  Description of Artificial Sequence: Synthetic light chain variable region CDR L1
agggccagtcagagtgttagcagctacttagcc

SEQ ID NO: 1917 - protein, 7 aa, Artificial Sequence
  Description of Artificial Sequence: Synthetic light chain variable region CDR L2
EASDRAT

SEQ ID NO: 1918 - DNA, 21 bp, Artificial Sequence
  Description of Artificial Sequence: Synthetic light chain variable region CDR L2
gaagcatccgacagggccact

SEQ ID NO: 1919 - protein, 10 aa, Artificial Sequence
  Description of Artificial Sequence: Synthetic light chain variable region CDR L3
QQRSNWGVGT

SEQ ID NO: 1920 - DNA, 30 bp, Artificial Sequence
  Description of Artificial Sequence: Synthetic light chain variable region CDR L3
cagcagcgtagtaactggggggtaggaacg

SEQ ID NO: 1921 - DNA, 387 bp, Artificial Sequence
  Description of Artificial Sequence: Synthetic heavy chain variable region
caggtgcagctggtgcagtctggggctgaggtgaagaagcctgggtcctcggtgagggtcacctgcaaggcttctggaggcaccgtcagcgactatgcaatcacctgggtccgacaggcgcctggacaagggcttgagtggatgggagggttcatccctatgtttggtgtcgcaaaggacgcagagaagttccagggcagagtcacgctgactggggacaaatccacgaacgcagtttacatggagctgagcagcctgacatctgaagacacggccgtctattactgtgcgagatcgaagagactaccagctggtttatctacgtctgactactactactactatttggacgtctggggcaaagggaccacggtcaccgtctcctca

SEQ ID NO: 1922 - protein, 129 aa, Artificial Sequence
  Description of Artificial Sequence: Synthetic heavy chain variable region
QVQLVQSGAEVKKPGSSVRVTCKASGGTVSDYAITWVRQAPGQGLEWMGGFIPMFGVAKDAEKFQGRVTLTGDKSTNAVYMELSSLTSEDTAVYYCARSKRLPAGLSTSDYYYYYLDVWGKGTTVTVSS

SEQ ID NO: 1923 - protein, 9 aa, Artificial Sequence
  Description of Artificial Sequence: Synthetic heavy chain variable region CDR H1
GTVSDYAIT

SEQ ID NO: 1924 - DNA, 27 bp, Artificial Sequence
  Description of Artificial Sequence: Synthetic heavy chain variable region CDR H1
ggcaccgtcagcgactatgcaatcacc

SEQ ID NO: 1925 - protein, 17 aa, Artificial Sequence
  Description of Artificial Sequence: Synthetic heavy chain variable region CDR H2
GFIPMFGVAKDAEKFQG

SEQ ID NO: 1926 - DNA, 51 bp, Artificial Sequence
  Description of Artificial Sequence: Synthetic heavy chain variable region CDR H2
gggttcatccctatgtttggtgtcgcaaaggacgcagagaagttccagggc

SEQ ID NO: 1927 - protein, 22 aa, Artificial Sequence
  Description of Artificial Sequence: Synthetic heavy chain variable region CDR H3
ARSKRLPAGLSTSDYYYYYLDV

SEQ ID NO: 1928 - DNA, 66 bp, Artificial Sequence
  Description of Artificial Sequence: Synthetic heavy chain variable region CDR H3
gcgagatcgaagagactaccagctggtttatctacgtctgactactactactactatttggacgtc

SEQ ID NO: 1929 - DNA, 324 bp, Artificial Sequence
  Description of Artificial Sequence: Synthetic light chain variable region
gaaattgtattgacacagtctccaggcaccctgtctttgtctccaggggaaggagccaccctctcctgtacggccagtcagaatgttttccgcacccacgtagcctggtaccagcagactcctggccaggctcccaggctcctcatctatggtgggtccaccagggccactggcatcccagacaggttcagtggcagcgggtctgggacagacttcactctcatcatcagcagactggaacctgaagattttgcagtctattactgtcatcactttggtaccacaccgtggacgttcggccaagggaccaaggtggagatcaaa

SEQ ID NO: 1930 - protein, 108 aa, Artificial Sequence
  Description of Artificial Sequence: Synthetic light chain variable region
EIVLTQSPGTLSLSPGEGATLSCTASQNVFRTHVAWYQQTPGQAPRLLIYGGSTRATGIPDRFSGSGSGTDFTLIISRLEPEDFAVYYCHHFGTTPWTFGQGTKVEIK

SEQ ID NO: 1931 - protein, 12 aa, Artificial Sequence
  Description of Artificial Sequence: Synthetic light chain variable region CDR L1
TASQNVFRTHVA

SEQ ID NO: 1932 - DNA, 36 bp, Artificial Sequence
  Description of Artificial Sequence: Synthetic light chain variable region CDR L1
acggccagtcagaatgttttccgcacccacgtagcc

SEQ ID NO: 1933 - protein, 7 aa, Artificial Sequence
  Description of Artificial Sequence: Synthetic light chain variable region CDR L2
GGSTRAT

SEQ ID NO: 1934 - DNA, 21 bp, Artificial Sequence
  Description of Artificial Sequence: Synthetic light chain variable region CDR L2
ggtgggtccaccagggccact

SEQ ID NO: 1935 - protein, 9 aa, Artificial Sequence
  Description of Artificial Sequence: Synthetic light chain variable region CDR L3
HHFGTTPWT

SEQ ID NO: 1936 - DNA, 27 bp, Artificial Sequence
  Description of Artificial Sequence: Synthetic light chain variable region CDR L3
catcactttggtaccacaccgtggacg

SEQ ID NO: 1937 - DNA, 369 bp, Artificial Sequence
  Description of Artificial Sequence: Synthetic heavy chain variable region
gaggtgcagctggtggagtctgggcctgaggtgaaggggcctgggtcctcggtgaaagtctcatgcgaggcttctgcagccaccttcagcaactacgctatcagctgggtccgacaggcccctggacaagggcttgagtggatgggagggttcgtccctatgttagggacaaggaactacgcacagaagttcaagggcagagtcactctgaccgcggacgtatccacacatacattgtacttggagattggtagtctgagatttgaggacacggccgtgtattactgtgcgacagtggccggtctgggaaccagctatggtcgataccttgagtcttggggccagggaaccctggtcaccgtctcctca

SEQ ID NO: 1938 - protein, 123 aa, Artificial Sequence
  Description of Artificial Sequence: Synthetic heavy chain variable region
EVQLVESGPEVKGPGSSVKVSCEASAATFSNYAISWVRQAPGQGLEWMGGFVPMLGTRNYAQKFKGRVTLTADVSTHTLYLEIGSLRFEDTAVYYCATVAGLGTSYGRYLESWGQGTLVTVSS

SEQ ID NO: 1939 - protein, 9 aa, Artificial Sequence
  Description of Artificial Sequence: Synthetic heavy chain variable region CDR H1
ATFSNYAIS

SEQ ID NO: 1940 - DNA, 27 bp, Artificial Sequence
  Description of Artificial Sequence: Synthetic heavy chain variable region CDR H1
gccaccttcagcaactacgctatcagc

SEQ ID NO: 1941 - protein, 17 aa, Artificial Sequence
  Description of Artificial Sequence: Synthetic heavy chain variable region CDR H2
GFVPMLGTRNYAQKFKG

SEQ ID NO: 1942 - DNA, 51 bp, Artificial Sequence
  Description of Artificial Sequence: Synthetic heavy chain variable region CDR H2
gggttcgtccctatgttagggacaaggaactacgcacagaagttcaagggc

SEQ ID NO: 1943 - protein, 16 aa, Artificial Sequence
  Description of Artificial Sequence: Synthetic heavy chain variable region CDR H3
ATVAGLGTSYGRYLES

SEQ ID NO: 1944 - DNA, 48 bp, Artificial Sequence
  Description of Artificial Sequence: Synthetic heavy chain variable region CDR H3
gcgacagtggccggtctgggaaccagctatggtcgataccttgagtct

SEQ ID NO: 1945 - DNA, 321 bp, Artificial Sequence
  Description of Artificial Sequence: Synthetic light chain variable region
gacatccggatgacccagtctccatcttctgtgtctgcgtctcttggagacagagtcaccatcacttgtcgggcgagtcaggatattagcaccgcgttagcctggtatcagcagataccagggaaggcccctaaactcctgatctatgaagcatccagtttgcaaagtggggtcccatccaggttcaggggcagtggatctgagacagacttcgctctcactatcagcagcctgcagcctgaagattttgcaacttactattgtcaacaggcaaagagtttcccgtacacttttggccaggggaccaaggtggagatcaaa

SEQ ID NO: 1946 - protein, 107 aa, Artificial Sequence
  Description of Artificial Sequence: Synthetic light chain variable region
DIRMTQSPSSVSASLGDRVTITCRASQDISTALAWYQQIPGKAPKLLIYEASSLQSGVPSRFRGSGSETDFALTISSLQPEDFATYYCQQAKSFPYTFGQGTKVEIK

SEQ ID NO: 1947 - protein, 11 aa, Artificial Sequence
  Description of Artificial Sequence: Synthetic light chain variable region CDR L1
RASQDISTALA

SEQ ID NO: 1948 - DNA, 33 bp, Artificial Sequence
  Description of Artificial Sequence: Synthetic light chain variable region CDR L1
cgggcgagtcaggatattagcaccgcgttagcc

SEQ ID NO: 1949 - protein, 7 aa, Artificial Sequence
  Description of Artificial Sequence: Synthetic light chain variable region CDR L2
EASSLQS

SEQ ID NO: 1950 - DNA, 21 bp, Artificial Sequence
  Description of Artificial Sequence: Synthetic light chain variable region CDR L2
gaagcatccagtttgcaaagt

SEQ ID NO: 1951 - protein, 9 aa, Artificial Sequence
  Description of Artificial Sequence: Synthetic light chain variable region CDR L3
QQAKSFPYT

SEQ ID NO: 1952 - DNA, 27 bp, Artificial Sequence
  Description of Artificial Sequence: Synthetic light chain variable region CDR L3
caacaggcaaagagtttcccgtacact

SEQ ID NO: 1953 - DNA, 375 bp, Artificial Sequence
  Description of Artificial Sequence: Synthetic heavy chain variable region
caggtccagctggtgcagtctgggggaggcttggcgcagcctggagggtccctgagactctcctgtgcagcctccggattcatcttcagtgtttatgaaatggactgggtccgccaggctccagggaaggggctggagtggctttcatacattgatattactggtaatagtgtaacctatgcagactctgtgaggggccggttcaccatctccagagacaacgccaggaactcactctacctgcaaatggacagcctgagagtcgaggacacggctgtatattattgtgttagagatagtcgcggccctacaacgcagtggctcacgggatactttgacttctggggccaggggaccacggtcaccgtctcctca

SEQ ID NO: 1954 - protein, 125 aa, Artificial Sequence
  Description of Artificial Sequence: Synthetic heavy chain variable region
QVQLVQSGGGLAQPGGSLRLSCAASGFIFSVYEMDWVRQAPGKGLEWLSYIDITGNSVTYADSVRGRFTISRDNARNSLYLQMDSLRVEDTAVYYCVRDSRGPTTQWLTGYFDFWGQGTTVTVSS

SEQ ID NO: 1955 - protein, 9 aa, Artificial Sequence
  Description of Artificial Sequence: Synthetic heavy chain variable region CDR H1
FIFSVYEMD

SEQ ID NO: 1956 - DNA, 27 bp, Artificial Sequence
  Description of Artificial Sequence: Synthetic heavy chain variable region CDR H1
ttcatcttcagtgtttatgaaatggac

SEQ ID NO: 1957 - protein, 17 aa, Artificial Sequence
  Description of Artificial Sequence: Synthetic heavy chain variable region CDR H2
YIDITGNSVTYADSVRG

SEQ ID NO: 1958 - DNA, 51 bp, Artificial Sequence
  Description of Artificial Sequence: Synthetic heavy chain variable region CDR H2
tacattgatattactggtaatagtgtaacctatgcagactctgtgaggggc

SEQ ID NO: 1959 - protein, 18 aa, Artificial Sequence
  Description of Artificial Sequence: Synthetic heavy chain variable region CDR H3
VRDSRGPTTQWLTGYFDF

SEQ ID NO: 1960 - DNA, 54 bp, Artificial Sequence
  Description of Artificial Sequence: Synthetic heavy chain variable region CDR H3
gttagagatagtcgcggccctacaacgcagtggctcacgggatactttgacttc

SEQ ID NO: 1961 - DNA, 324 bp, Artificial Sequence
  Description of Artificial Sequence: Synthetic light chain variable region
gacatccggatgacccagtctccagccaccctgtctttgtctccaggggaaagagccaccctctcctgcagggccagtcagagtgttagcaactacttagcctggtaccaacagaaacctggccaggctcccaggctcctcatctatgatgtatccaatagggccactggcatcccagccaggttcagtggcagtgggtccgggacagacttcactctcaccatcagcagcctggagcctgaagattttgcagtttattactgtcagcagcgtcgcaactggcctccgctcactttcggcggagggaccaaggtggaggtcaaa

SEQ ID NO: 1962 - protein, 108 aa, Artificial Sequence
  Description of Artificial Sequence: Synthetic light chain variable region
DIRMTQSPATLSLSPGERATLSCRASQSVSNYLAWYQQKPGQAPRLLIYDVSNRATGIPARFSGSGSGTDFTLTISSLEPEDFAVYYCQQRRNWPPLTFGGGTKVEVK

SEQ ID NO: 1963 - protein, 11 aa, Artificial Sequence
  Description of Artificial Sequence: Synthetic light chain variable region CDR L1
RASQSVSNYLA

SEQ ID NO: 1964 - DNA, 33 bp, Artificial Sequence
  Description of Artificial Sequence: Synthetic light chain variable region CDR L1
agggccagtcagagtgttagcaactacttagcc

SEQ ID NO: 1965 - protein, 7 aa, Artificial Sequence
  Description of Artificial Sequence: Synthetic light chain variable region CDR L2
DVSNRAT

SEQ ID NO: 1966 - DNA, 21 bp, Artificial Sequence
  Description of Artificial Sequence: Synthetic light chain variable region CDR L2
gatgtatccaatagggccact

SEQ ID NO: 1967 - protein, 10 aa, Artificial Sequence
  Description of Artificial Sequence: Synthetic light chain variable region CDR L3
QQRRNWPPLT

SEQ ID NO: 1968 - DNA, 30 bp, Artificial Sequence
  Description of Artificial Sequence: Synthetic light chain variable region CDR L3
cagcagcgtcgcaactggcctccgctcact
